(19) United States
(12) Patent Application Publication
(10) Pub. No.: US 2024/0374712 A1
(43) Pub. Date: Nov. 14, 2024

(54) SARS-COV-2 VACCINE COMPOSITIONS

(71) Applicant: Novavax, Inc., Gaithersburg, MD (US)

(72) Inventors: Gale SMITH, Germantown, MD (US); Nita PATEL, Gaithersburg, MD (US)

(21) Appl. No.: 18/645,259

(22) Filed: Apr. 24, 2024

Related U.S. Application Data
(60) Provisional application No. 63/497,986, filed on Apr. 24, 2023.
(60) Provisional application No. 63/507,079, filed on Jun. 8, 2023.
(60) Provisional application No. 63/507,412, filed on Jun. 9, 2023.
(60) Provisional application No. 63/508,088, filed on Jun. 14, 2023.
(60) Provisional application No. 63/579,438, filed on Aug. 29, 2023.
(60) Provisional application No. 63/580,596, filed on Sep. 5, 2023.

(51) Int. Cl. A61K 39/215; A61K 39/00; A61P 31/14; C12N 7/00

(52) U.S. Cl. CPC A61K 39/215; A61P 31/14; C12N 7/00; A61K 2039/53; A61K 2039/545; A61K 2039/55555; A61K 2039/55577; A61K 2039/575; C12N 2770/20022; C12N 2770/20034

(57) ABSTRACT

Disclosed herein are coronavirus (CoV) Spike(S) polypeptides, including naturally and non-naturally occurring polypeptides, and nanoparticles and immunogenic compositions comprising the same, which are useful for stimulating immune responses against various SARS-COV-2 strains. The nanoparticles present antigens from pathogens surrounded to and associated with a detergent core resulting in enhanced stability and good immunogenicity. Dosages, formulations, and methods for preparing the vaccines and nanoparticles are also disclosed.

### CROSS REFERENCE TO RELATED APPLICATIONS

[0001] This application claims priority from U.S. Provisional Application Nos. 63/497,986, filed Apr. 24, 2023, 63/507,079 filed Jun. 8, 2023, 63/507,412 filed Jun. 9, 2023, 63/508,088 filed Jun. 14, 2023, 63/579,438 filed Aug. 29, 2023, and 63/580,596 filed on Sep. 5, 2023, the entire contents of which are hereby incorporated by reference.

### DESCRIPTION OF THE TEXT FILE SUBMITTED ELECTRONICALLY

[0002] The contents of the electronic sequence listing (1450_103US1_Sequence_Listing_04_24_2024.xml; Size: 817,457 bytes; and Date of Creation: Apr. 24, 2024) are herein incorporated by reference in its entirety.

### FIELD

[0003] The present disclosure is generally related to coronavirus (CoV) Spike(S) polypeptides, including naturally and non-naturally occurring polypeptides, and nanoparticles and immunogenic compositions comprising the same, which are useful for stimulating immune responses. The nanoparticles provide antigens, for example, glycoprotein antigens, optionally associated with a detergent core and are typically produced using recombinant approaches. The nanoparticles have improved stability and enhanced epitope presentation. The disclosure also provides compositions containing the nanoparticles, methods for producing them, and methods of stimulating immune responses.

### BACKGROUND OF THE INVENTION

[0004] Infectious diseases remain a problem throughout the world. While progress has been made on developing vaccines against some pathogens, many remain a threat to human health. The outbreak of sudden acute respiratory syndrome coronavirus 2 (SARS-COV-2) has caused 6.5 million deaths worldwide. The SARS-COV-2 coronavirus belongs to the same family of viruses as severe acute respiratory syndrome coronavirus (SARS-COV) and Middle East respiratory syndrome coronavirus (MERS-COV), which have killed hundreds of people in the past 17 years. SARS-COV-2 causes the disease COVID-19.

[0005] The development of vaccines that prevent or reduce the severity of life-threatening infectious diseases like the SARS-COV-2 coronavirus is desirable. However, human vaccine development remains challenging because of the highly sophisticated evasion mechanisms of pathogens and difficulties stabilizing vaccines. The development of a vaccine that induces protection against current SARS-COV-2 strains and SARS-COV-2 strains that will emerge in the future is desirable.

### SUMMARY OF THE INVENTION

[0006] The present disclosure provides CoV S polypeptides, including naturally and non-naturally occurring polypeptides, and compositions containing the same suitable for inducing immune responses against SARS-COV-2. The disclosure also provides nanoparticles and compositions containing the glycoproteins as well as methods of stimulating immune responses. The nanoparticles and compositions described herein also are suitable for inducing cross-neutralizing immune responses against Middle East Respiratory Syndrome (MERS) and Severe Acute Respiratory Syndrome (SARS).

### BRIEF DESCRIPTION OF THE DRAWINGS

[0007] FIG. 1A shows the primary structure of a wild-type SARS-COV-2 S polypeptide, containing a signal peptide, numbered with respect to SEQ ID NO: 1. FIG. 1B shows the primary structure of a wild-type SARS-COV-2 S polypeptide, without a signal peptide, numbered with respect to SEQ ID NO: 2.

[0008] FIG. 2 shows the dosage regimen of Example 7.

[0009] FIGS. 3A-3F show that Composition 3 (FIG. 3A, FIG. 3D), Composition 2 (FIG. 3B, FIG. 3E), and Composition 1 (FIG. 3C, FIG. 3F) of Example 3 each neutralized pseudoviruses expressing S proteins from various SARS-COV-2 heterogeneous strains. Open circles of FIGS. 3D-3F represent individual data points, solid bars represent group geometric mean titers, error bars represent 95% confidence intervals, and the horizontal dashed line represents the assay limit of detection (LOD).

[0010] FIGS. 4A-4D show that administration of two doses of Composition 2 (FIG. 4A, FIG. 4C), a monovalent composition comprising a CoV S glycoprotein of SEQ ID NO: 274, results in a superior immune response in mice to administration of two doses of Composition 4 (FIG. 4B, FIG. 4D), which is a bivalent composition containing a CoV S glycoprotein of SEQ ID NO: 274 and a CoV S glycoprotein of SEQ ID NO: 87. Open circles of FIGS. 4C-4D represent individual data points, solid bars represent group geometric mean titers, error bars represent 95% confidence intervals, and the horizontal dashed line represents the assay limit of detection (LOD).

[0011] FIGS. 5A-5F shows the immune response induced by a boost dose containing Composition 2 (FIG. 5B, FIG. 5E) or Composition 3 (FIG. 5C, FIG. 5F) of Example 3. Boosting with either Composition 2 (FIG. 5B, FIG. 5E) or Composition 1 (FIG. 5C, FIG. 5F) resulted in an improved immune response against pseudoviruses expressing S proteins from various SARS-COV-2 heterogeneous strains, as compared to mice that were not boosted (FIG. 5A, FIG. 5D).

[0012] FIGS. 6A-6C shows the immune response induced by a boost dose containing Composition 2 (FIG. 6B) or Composition 3 (FIG. 6C) of Example 3. Boosting with either Composition 2 (FIG. 6B) or Composition 1 (FIG. 6C) resulted in an improved immune response against pseudoviruses expressing S proteins from various SARS-COV-2 heterogeneous strains, as compared to mice that were not boosted (FIG. 6A).

[0013] FIGS. 7A-7E show the ability of serum from Rhesus macaques that are administered various immunogenic compositions to neutralize pseudovirus. FIG. 7A shows the ability of serum from Rhesus macaques administered two doses of Composition 3 and a booster dose of Composition 2 to neutralize pseudovirus. FIG. 7B shows the ability of serum from Rhesus macaques administered two doses of Composition 6 and a booster dose of Composition 2 to neutralize pseudovirus. FIG. 7C shows the ability of serum from Rhesus macaques administered two doses of Composition 5 and a booster dose of Composition 2 to neutralize pseudovirus. FIG. 7D shows the ability of serum from Rhesus macaques administered primary dose of Composition 3 followed by a booster dose of Composition 2 to neutralize pseudovirus. FIG. 7E shows the ability of serum from Rhesus macaques administered primary dose of Composition 5 followed by a booster dose of Composition 2 to neutralize pseudovirus.

[0014] FIG. 8 shows the ability of a dosage regimen comprising administering two doses of Composition 5 followed by boosting with Composition 2 to induce an immune response that blocks binding of hACE 2 to a SARS-COV-2 S glycoprotein. Compositions 2 and 5 are described in Example 3.

[0015] FIGS. 9A-9C show the ability of various dosage regimens to induce an immune response in Rhesus macaques that blocks binding of hACE 2 to a SARS-COV-2 S glycoprotein. FIG. 9A shows the immune response induced when two doses of Composition 3 are administered, followed by a boost of Composition 2. FIG. 9B shows the immune response induced when two doses of Composition 6 are administered, followed by a boost of Composition 2. FIG. 9C shows the immune response induced when two doses of Composition 5 are administered, followed by a boost of Composition 2. Compositions 2, 3, 5, and 6 are described in Example 3.

[0016] FIGS. 10A-10B shows the ratio of Th1/Th2 cytokines produced by CD4+ T cells in mice administered two doses of Composition 3 followed by a boost dose with Composition 2 (FIG. 10A), or two doses of Composition 5, followed by a boost dose of Composition 2 (FIG. 10B). Compositions 2, 3, and 5 are described in Example 3.

[0017] FIG. 11 shows the CD4+ T cell response in Rhesus macaques administered two doses of Composition 5, followed by a boost dose of Composition 2. Compositions 5 and 2 are described in Example 3.

[0018] FIG. 12 shows the dosage regimen of Example 8.

[0019] FIG. 13A shows the anti-S IgG antibodies in mice after administration of two doses of an immunogenic composition comprising the SARS-COV 2 S glycoprotein of SEQ ID NO: 274. FIG. 13B shows the anti-S IgG antibodies in mice after administration of two doses of an immunogenic composition comprising the SARS-COV 2 S glycoprotein of SEQ ID NO: 260. Additional experimental details are found in Example 8.

[0020] FIG. 14A shows that administration of two doses of an immunogenic composition comprising the SARS-COV 2 S glycoprotein of SEQ ID NO: 274 results in antibodies that block binding of SARS-COV-2 to hACE2. FIG. 14B shows that administration of two doses of an immunogenic composition comprising the SARS-COV 2 S glycoprotein of SEQ ID NO: 260 results in antibodies that block binding of SARS-COV-2 to hACE2. Additional experimental details are found in Example 8.

[0021] FIG. 15A and FIG. 16B show that administration of two doses of an immunogenic composition comprising the SARS-COV 2 S glycoprotein of SEQ ID NO: 274 results in neutralization of pseudoviruses expressing SARS-COV-2 S glycoproteins. FIG. 15B and FIG. 16C show that administration of two doses of an immunogenic composition comprising the SARS-COV 2 S glycoprotein of SEQ ID NO: 260 results in neutralization of pseudoviruses expressing SARS-CoV-2 S glycoproteins. Additional experimental details are found in Example 8.

[0022] FIG. 16A shows the neutralizing antibody titer resulting from administering two doses of an immunogenic composition comprising the SARS-COV 2 S glycoprotein of SEQ ID NO: 87. FIG. 16B shows that administration of two doses of an immunogenic composition comprising the SARS-COV 2 S glycoprotein of SEQ ID NO: 274 results in neutralization of pseudoviruses expressing SARS-COV-2 S glycoproteins. FIG. 16C shows that administration of two doses of an immunogenic composition comprising the SARS-COV 2 S glycoprotein of SEQ ID NO: 260 results in neutralization of pseudoviruses expressing SARS-COV-2 S glycoproteins. Additional experimental details are found in Example 8.

[0023] FIG. 17 shows the dosage regimen of Example 9.

[0024] FIG. 18A shows the anti-S IgG antibodies in serum of mice after administration of two doses of an immunogenic composition comprising the SARS-COV 2 S glycoprotein of SEQ ID NO: 274. FIG. 18B shows the neutralizing antibodies present in the serum of mice after administration of two doses of an immunogenic composition comprising the SARS-COV 2 S glycoprotein of SEQ ID NO: 274. Additional experimental details are found in Example 9.

[0025] FIG. 19A shows the antigenic cartography of neutralizing responses induced by immunizing with two doses of an immunogenic composition comprising the SARS-COV 2 S glycoprotein of SEQ ID NO: 274. FIG. 19B shows the antigenic cartography of neutralizing responses induced by boosting with an immunogenic composition comprising the SARS-COV 2 S glycoprotein of SEQ ID NO: 274. FIG. 19C shows the antigenic cartography of neutralizing responses induced by boosting with an immunogenic composition comprising the SARS-COV 2 S glycoprotein of SEQ ID NO: 260. Additional experimental details are found in Example 9.

[0026] FIG. 20A shows pseudovirus neutralizing titers induced by administering a SARS-COV-2 S glycoprotein of SEQ ID NO: 274 in the primary series. FIG. 20B shows pseudovirus neutralizing titers induced by administering a SARS-COV-2 S glycoprotein of SEQ ID NO: 274 in the one month boost. FIG. 20C shows pseudovirus neutralizing titers induced by administering a SARS-CoV-2 S glycoprotein of SEQ ID NO: 260 in the one month boost. Additional experimental details are found in Example 9.

[0027] FIG. 21 shows the dosage regimen of Example 10.

[0028] FIG. 22A shows the anti-S IgG antibodies in serum of macaques after administration of a first dose and a second dose containing the SARS-COV 2 S glycoprotein of SEQ ID NO: 87 and administration of a third dose containing a SARS-COV 2 S glycoprotein of SEQ ID NO: 274. FIG. 22B shows the anti-S IgG antibodies in serum of macaques after administration of a first dose and a second dose containing the SARS-COV 2 S glycoprotein of SEQ ID NO: 222 and administration of a third dose containing a SARS-COV 2 S glycoprotein of SEQ ID NO: 274. FIG. 22C shows the anti-S IgG antibodies in serum of macaques after administration of a first dose and a second dose containing the SARS-COV 2 S glycoprotein of SEQ ID NO: 87 and the SARS-COV-2 S glycoprotein of SEQ ID NO: 222 and administration of a third dose containing a SARS-COV 2 S glycoprotein of SEQ ID NO: 274. Additional experimental details are found in Example 10.

[0029] FIG. 23 shows the anti-S IgG antibodies in serum of macaques after administration of a first dose and a second dose containing the SARS-COV 2 S glycoprotein of SEQ ID NO: 274. FIG. 24 shows pseudovirus neutralizing titers induced by administering a SARS-COV-2 S glycoprotein of SEQ ID NO: 274 in the primary series. Additional experimental details are found in Example 10.

[0030] FIG. 25 shows the CD4+ T cell response of macaques administered a first dose and a second dose containing the SARS-COV 2 S glycoprotein of SEQ ID NO: 274. Additional experimental details are found in Example 10.

[0031] FIG. 26 shows the multifunctional antigen specific CD4+ T cell response of macaques administered a first dose and a second dose containing the SARS-COV 2 S glycoprotein of SEQ ID NO: 274. Additional experimental details are found in Example 10.

[0032] FIG. 27 shows the dosage regimen of Example 11.

[0033] FIG. 28A shows the anti-rS IgG antibodies in serum of mice after administration of two doses of an immunogenic composition comprising the SARS-COV 2 S glycoprotein of SEQ ID NO: 274. FIG. 28B shows the neutralizing antibodies present in the serum of mice after administration of two doses of an immunogenic composition comprising the SARS-COV 2 S glycoprotein of SEQ ID NO: 329. Additional experimental details are found in Example 11.

[0034] FIG. 29A shows pseudovirus neutralizing titers induced by administering a SARS-COV-2 S glycoprotein of SEQ ID NO: 274 in the primary series. FIG. 29B shows pseudovirus neutralizing titers induced by administering a SARS-COV-2 S glycoprotein of SEQ ID NO: 329 in the primary series. Additional experimental details are found in Example 11.

[0035] FIG. 30 shows pseudovirus neutralizing titers and antigenic distances induced by administering a SARS-COV-2 S glycoprotein of SEQ ID NO: 274 in the primary series against different SARS-COV-2 variant strains, with low titers for JN.1 and JN. 1 subvariants. Additional experimental details are found in Example 11.

[0036] FIG. 31 shows pseudovirus neutralizing titers and antigenic distances induced by administering a SARS-COV-2 S glycoprotein of SEQ ID NO: 329 in the primary series against different SARS-COV-2 variant strains, with high titers for JN.1 and JN.1 subvariants. Additional experimental details are found in Example 11.

[0037] FIGS. 32A-32D show the anti-rS IgG antibodies in serum of mice after administration of Composition 2 in the primary series (FIG. 32A), compared to the anti-rS IgG antibodies in scrum of mice prior to administration of a boost dose (FIG. 32B), against the anti-rS IgG antibodies in serum of mice induced after administration of a boost dose containing Composition 2 (FIG. 32C) or Composition 8 (FIG. 32D). Additional experimental details are found in Example 11.

[0038] FIGS. 33A-33C show pseudovirus neutralizing titers and antigenic distances induced by administering a SARS-COV-2 S glycoprotein of SEQ ID NO: 274 in the primary series followed by a boost dose containing Composition 8 (FIG. 33C) of Example 11. Boosting with Composition 8 (FIG. 33C) resulted in an improved immune response against pseudoviruses expressing S proteins from various SARS-COV-2 heterogeneous strains, as compared to pre-boosted mice (FIG. 33B) who received a primary dose of Composition 2 (FIG. 33A). Additional experimental details arc found in Example 11.

[0039] FIGS. 34A-34B show pseudovirus neutralizing titers and antigenic distances induced by administering Composition 2 (FIG. 34A) in the primary series followed by a boost dose after 2 months containing Composition 8 (FIG. 34B) of Example 11. Boosting with Composition 8 (FIG. 34B) elicited an improved immune response against pseudoviruses expressing S proteins from various SARS-COV-2 heterogeneous strains (FIG. 34A). Additional experimental details are found in Example 11.

[0040] FIGS. 35A-35B show pseudovirus neutralizing titers and antigenic distances induced by administering Composition 7 (FIG. 35A) in the primary series followed by a boost dose after 2 months containing Composition 8 (FIG. 35B) of Example 11. Boosting with Composition 8 (FIG. 35B) elicited an improved immune response against pseudoviruses expressing S proteins from various SARS-COV-2 heterogeneous strains (FIG. 35A). Additional experimental details are found in Example 11.

[0041] FIG. 36 shows the ratio of Th1/Th2 cytokines produced by CD4+ T cells in mice administered with doses of Composition 2 followed by a boost dose at 2 months with Composition 2. Additional experimental details are found in Example 11.

[0042] FIG. 37 shows the ratio of Th1/Th2 cytokines produced by CD4+ T cells in mice administered with doses of Composition 2 followed by a boost dose at 2 months with Composition 8. Additional experimental details are found in Example 11.

[0043] FIGS. 38A-38B show the Triple_Th 1 CD4+ T cell response in mice administered with doses of Composition 2 followed by a boost dose at 2 months with Composition 2 (FIG. 38A) and in mice administered with doses of Composition 2 followed by a boost dose at 2 months with Composition 8 (FIG. 38B). Additional experimental details are found in Example 11.

[0044] FIGS. 39A-39B show the CD4+ T cell IFN-γ response in mice administered with doses of Composition 2 followed by a boost dose at 2 months with Composition 2 (FIG. 39A) and in mice administered with doses of Composition 2 followed by a boost dose at 2 months with Composition 8 (FIG. 39B). Additional experimental details are found in Example 11.

[0045] FIGS. 40A-40B show the CD8+ T cell Th1 responses in mice administered with doses of Composition 2 followed by a boost dose at 2 months with Composition 2 (FIG. 40A) and in mice administered with doses of Composition 2 followed by a boost dose at 2 months with Composition 8 (FIG. 40B). Additional experimental details are found in Example 11.

[0046] FIG. 41A shows T follicular helper cell levels (Tfh) in mice administered with doses of Composition 2 followed by a boost dose at 2 months with Composition compared to in mice administered with doses of Composition 2 followed by a boost dose at 2 months with Composition 8. FIG. 41B shows Germinal Center (GC) B cell levels in mice administered with doses of Composition 2 followed by a boost dose at 2 months with Composition compared to in mice administered with doses of Composition 2 followed by a boost dose at 2 months with Composition 8.

[0047] FIG. 42 shows the dosage regimen of Example 12.

[0048] FIG. 43A shows the anti-rS responses in primed Rhesus macaques prior to administration of a second booster dose of an immunogenic composition comprising the SARS-COV 2 S glycoprotein of SEQ ID NO: 329. FIG. 43B shows the anti-rS responses in primed Rhesus macaques after administration of a second booster dose of an immunogenic composition comprising the SARS-COV 2 S glycoprotein of SEQ ID NO: 329. Additional experimental details are found in Example 12.

[0049] FIG. 44A shows pseudovirus neutralizing titers and antigenic distances in primed Rhesus macaques prior to administration of a second booster dose of an immunogenic composition comprising the SARS-COV 2 S glycoprotein of SEQ ID NO: 329. FIG. 44B shows pseudovirus neutralizing titers and antigenic distances in primed Rhesus macaques after administration of a second booster dose of an immunogenic composition comprising the SARS-COV 2 S glycoprotein of SEQ ID NO: 329. A second booster dose of an immunogenic composition comprising the SARS-COV 2 S glycoprotein of SEQ ID NO: 329 elicited pseudovirus neutralizing antibodies against different SARS-COV-2 variant strains. Additional experimental details are found in Example 12.

[0050] FIG. 45 shows the CD4+ T cell IFN-γ response in primed Rhesus macaques after administration of a second booster dose of an immunogenic composition comprising the SARS-CoV 2 S glycoprotein of SEQ ID NO: 329. A second booster dose of an immunogenic composition comprising the SARS-COV 2 S glycoprotein of SEQ ID NO: 329 elicited a Th1-biased cellular response and conserved T-cell epitopes recognized for all variants tested. Additional experimental details are found in Example 12.

[0051] FIG. 46 shows the multifunctional antigen specific CD4+ T cell response of primed Rhesus macaques after administration of a second booster dose of an immunogenic composition comprising the SARS-COV 2 S glycoprotein of SEQ ID NO: 329. Additional experimental details are found in Example 12.

### DETAILED DESCRIPTION OF THE INVENTION

### Definitions

[0052] As used herein, and in the appended claims, the singular forms “a”, “an”, and “the” include plural referents unless the context clearly dictates otherwise. Thus, for example, reference to “a protein” can refer to one protein or to mixtures of such protein, and reference to “the method” includes reference to equivalent steps and/or methods known to those skilled in the art, and so forth.

[0053] As used herein, the term “adjuvant” refers to a compound that, when used in combination with an immunogen, augments or otherwise alters or modifies the immune response induced against the immunogen. Modification of the immune response may include intensification or broadening the specificity of either or both antibody and cellular immune responses.

[0054] As used herein, the term “about” or “approximately” when preceding a numerical value indicates the value plus or minus a range of 10%. For example, “about 100” encompasses 90 and 110.

[0055] As used herein, the terms “immunogen,” “antigen,” and “epitope” refer to substances such as proteins, including glycoproteins, and peptides that are capable of eliciting an immune response.

[0056] As used herein, an “immunogenic composition” is a composition that comprises an antigen where administration of the composition to a subject results in the development in the subject of a humoral and/or a cellular immune response to the antigen.

[0057] As used herein, a “subunit” composition, for example a vaccine, that includes one or more selected antigens but not all antigens from a pathogen. Such a composition is substantially free of intact virus or the lysate of such cells or particles and is typically prepared from at least partially purified, often substantially purified immunogenic polypeptides from the pathogen. The antigens in the subunit composition disclosed herein are typically prepared recombinantly, often using a baculovirus system.

[0058] As used herein, “substantially” refers to isolation of a substance (e.g. a compound, polynucleotide, or polypeptide) such that the substance forms the majority percent of the sample in which it is contained. For example, in a sample, a substantially purified component comprises 85%, preferably 85%-90%, more preferably at least 95%-99.5%, and most preferably at least 99% of the sample. If a component is substantially replaced the amount remaining in a sample is less than or equal to about 0.5% to about 10%, preferably less than about 0.5% to about 1.0%.

[0059] The terms “treat,” “treatment,” and “treating,” as used herein, refer to an approach for obtaining beneficial or desired results, for example, clinical results. For the purposes of this disclosure, beneficial or desired results may include inhibiting or suppressing the initiation or progression of an infection or a disease; ameliorating, or reducing the development of, symptoms of an infection or disease; or a combination thereof.

[0060] “Prevention,” as used herein, is used interchangeably with “prophylaxis” and can mean complete prevention of an infection or disease, or prevention of the development of symptoms of that infection or disease; a delay in the onset of an infection or disease or its symptoms; or a decrease in the severity of a subsequently developed infection or disease or its symptoms.

[0061] As used herein an “effective dose” or “effective amount” refers to an amount of an immunogen sufficient to induce an immune response that reduces at least one symptom of pathogen infection. An effective dose or effective amount may be determined e.g., by measuring amounts of neutralizing secretory and/or serum antibodies, e.g., by plaque neutralization, complement fixation, enzyme-linked immunosorbent (ELISA), or microneutralization assay.

[0062] As used herein, the term “vaccine” refers to an immunogenic composition, such as an immunogen derived from a pathogen, which is used to induce an immune response against the pathogen that provides protective immunity (e.g., immunity that protects a subject against infection with the pathogen and/or reduces the severity of the disease or condition caused by infection with the pathogen). The protective immune response may include formation of antibodies and/or a cell-mediated response. Depending on context, the term “vaccine” may also refer to a suspension or solution of an immunogen that is administered to a subject to produce protective immunity.

[0063] As used herein, the term “subject” includes humans and other animals. Typically, the subject is a human. For example, the subject may be an adult, a teenager, a child (2 years to 14 years of age), an infant (birth to 2 year), or a neonate (up to 2 months). In particular aspects, the subject is up to 4 months old, or up to 6 months old. In aspects, the adults are seniors about 65 years or older, or about 60 years or older. In aspects, the subject is a pregnant woman or a woman intending to become pregnant. In other aspects, subject is not a human; for example a non-human primate; for example, a baboon, a chimpanzee, a gorilla, or a macaque. In certain aspects, the subject may be a pet, such as a dog or cat.

[0064] In aspects, the subject is immunocompromised. In embodiments, the immunocompromised subject is administered a medication that causes immunosuppression. Non-limiting examples of medications that cause immunosuppression include corticosteroids (e.g., prednisone), alkylating agents (e.g., cyclophosphamide), antimetabolites (e.g., azathioprine or 6-mercaptopurine), transplant-related immunosuppressive drugs (e.g., cyclosporine, tacrolimus, sirolimus, or mycophenolate mofetil), mitoxantrone, chemotherapeutic agents, methotrexate, tumor necrosis factor (TNF)-blocking agents (e.g., etanercept, adalimumab, infliximab). In embodiments, the immunocompromised subject is infected with a virus (e.g., human immunodeficiency virus or Epstein-Barr virus). In embodiments, the virus is a respiratory virus, such as respiratory syncytial virus, influenza, parainfluenza, adenovirus, or a picornavirus. In embodiments, the immunocompromised subject has acquired immunodeficiency syndrome (AIDS). In embodiments, the immunocompromised subject is a person living with human immunodeficiency virus (HIV). In embodiments, the immunocompromised subject is immunocompromised due to a treatment regiment designed to prevent inflammation or prevent rejection of a transplant. In embodiments, the immunocompromised subject is a subject who has received a transplant. In embodiments, the immunocompromised subject has undergone radiation therapy or a splenectomy. In embodiments, the immunocompromised subject has been diagnosed with cancer, an autoimmune disease, tuberculosis, a substance use disorder (e.g., an alcohol, opioid, or cocaine use disorder), stroke or cerebrovascular disease, a solid organ or blood stem cell transplant, sickle cell disease, thalassemia, autoimmune lymphoproliferative syndrome (ALPS), autoimmune polyglandular syndrome type 1 (APS-1), B-cell expansion with NF-κB and T-cell anergy (BENTA) disease, capsase eight deficiency state (CEDS), chronic granulomatous disease (CGD), common variable immunodeficiency (CVID), congenital neutropenia syndromes, a deficiency in the cytotoxic T-lymphocyte-associated antigen 4 (CTLA-4), a DOCK8 deficiency, a GATA2 deficiency, a glycosylation disorder with immunodeficiency, a hyper-immunoglobulin E syndrome (HIES), hyper-immunoglobulin M syndrome, diabetes, type 1 diabetes, type 2 diabetes, interferon gamma deficiency, interleukin 12 deficiency, interleukin 23 deficiency, leukocyte adhesion deficiency, lipopolysaccharide-responsive beige-like anchor (LRBA) deficiency, PI3 kinase disease, PLCG2-associated antibody deficiency and immune dysregulation (PLAID), severe combined immunodeficiency (SCID), STAT3 dominant-negative disease, STAT3 gain-of-function disease, warts, hypogammaglobulinemia, infections, and myelokathexis (WHIM) syndrome, Wisckott-Aldrich syndrome (WAS), X-linked agammaglobulinemia (XLA), X-linked lymphoproliferative disease (XLP), uremia, malnutrition, or XMEN disease. In embodiments, the immunocompromised subject is a current or former cigarette smoker. In embodiments, the immunocompromised subject has a B-cell defect, T-cell defect, macrophage defect, cytokine defect, phagocyte deficiency, phagocyte dysfunction, complement deficiency or a combination thereof.

[0065] In embodiments, the subject is overweight or obese. In embodiments, an overweight subject has a body mass index (BMI)≥25 kg/m2 and <30 kg/m2. In embodiments, an obese subject has a BMI that is >30 kg/m2. In embodiments, the subject has a mental health condition. In embodiments, the mental health condition is depression, schizophrenia, or anxiety.

[0066] As used herein, the term “pharmaceutically acceptable” means being approved by a regulatory agency of a U.S. Federal or a state government or listed in the U.S. Pharmacopeia, European Pharmacopeia or other generally recognized pharmacopcia for use in mammals, and more particularly in humans. These compositions can be useful as a vaccine and/or antigenic compositions for inducing a protective immune response in a vertebrate.

[0067] As used herein, the term “NVX-CoV2373” refers to a vaccine composition comprising the BV2373 Spike glycoprotein (SEQ ID NO: 87) and Fraction A and Fraction C iscom matrix (e.g., MATRIX-M™).

[0068] As used herein, the term “modification” as it refers to a CoV S polypeptide refers to mutation, deletion, or addition of one amino acid of the CoV S polypeptide. The location of a modification within a CoV S polypeptide can be determined based on aligning the sequence of the polypeptide to SEQ ID NO: 1 (CoV S polypeptide containing signal peptide) or SEQ ID NO: 2 (mature CoV S polypeptide lacking a signal peptide).

[0069] The term SARS-COV-2 “variant”, used interchangeably herein with a “heterogeneous SARS-COV-2 strain,” refers to a SARS-COV-2 virus comprising a CoV S polypeptide having one or more modifications as compared to a SARS-COV S polypeptide having the amino acid sequence of SEQ ID NO: 1 or SEQ ID NO: 2. For example, a SARS-COV-2 variant may have at least about 2, at least about 3, at least about 4, at least about 5, at least about 6, at least about 7, at least about 8, at least about 9, at least about 10, at least about 11, at least about 12, at least about 13, at least about 14, at least about 15, at least about 16, at least about 17, at least about 18, at least about 19, at least about 20, at least about 21, at least about 22, at least about 23, at least about 24, at least about 25, at least about 26, at least about 27, at least about 28, at least about 29, at least about 30, at least about 31, at least about 32, at least about 33, at least about 34, or at least about 35 modifications, as compared to a CoV S polypeptide having the amino acid sequence of SEQ ID NO: 1 or SEQ ID NO: 2. For example, a SARS-COV-2 variant may have at least one and up to 2, up to 3, up to 4, up to 5, up to 6, up to 7, up to 8, up to 9, up to 10, up to 11, up to 12, up to 13, up to 14, up to 15, up to 16, up to 17, up to 18, up to 19, up to 20, up to 21, up to 22, up to 23, up to 24, up to 25, up to 26, up to 27, up to 28, up to 29, up to 30, up to 31, up to 32, up to 33, up to 34, up to 35 modifications, up to 40 modifications, up to 45 modifications, up to 50 modifications, up to 55 modifications, up to 60 modifications, up to 65 modifications, up to 70 modifications, up to 75 modifications, up to 80 modifications, up to 85 modifications, up to 90 modifications, up to 95 modifications, or up to 100 modifications as compared to a CoV S polypeptide having the amino acid sequence of SEQ ID NO: 1 or SEQ ID NO: 2. In aspects, a SARS-COV-2 variant may have between about 2 and about 35 modifications, between about 5 and about 10 modifications, between about 5 and about 20 modifications, between about 10 and about 20 modifications, between about 15 and about 25 modifications, between about 20 and 30 modifications, between about 20 and about 40 modifications, between about 25 and about 45 modifications, between about 25 and about 100 modifications, between about 25 and about 45 modifications, between about 35 and about 100 modifications, as compared to a CoV S polypeptide having the amino acid sequence of SEQ ID NO: 1 or SEQ ID NO: 2.

[0070] In embodiments, the heterogenous SARS-COV-2 strain is a SARS-COV-2 virus comprising a CoV S polypeptide with at least about 70%, at least about 75%, at least about 80%, at least about 85%, at least about 90%, at least about 95%, at least about 96%, at least about 97%, at least about 98%, or at least about 99% identity to a CoV S polypeptide having the amino acid sequence of SEQ ID NO: 1 or SEQ ID NO: 2. In embodiments, the heterogeneous SARS-CoV-2 strain is a SARS-COV-2 virus comprising a CoV S polypeptide with between about 70% and about 99.9% identity to a CoV S polypeptide having the amino acid sequence of SEQ ID NO: 1 or SEQ ID NO: 2. In embodiments, the heterogeneous SARS-COV-2 strain is a SARS-COV-2 virus comprising a CoV S polypeptide with between about 70% and about 99.5% identity to a CoV S polypeptide having the amino acid sequence of SEQ ID NO: 1 or SEQ ID NO: 2. In embodiments, the heterogenous SARS-COV-2 strain is a SARS-COV-2 virus comprising a CoV S polypeptide with between about 90% and about 99.9% identity to a CoV S polypeptide having the amino acid sequence of SEQ ID NO: 1 or SEQ ID NO: 2. In embodiments, the heterogeneous SARS-COV-2 strain is a SARS-COV-2 virus comprising a CoV S polypeptide with between about 90% and about 99.8% identity to a CoV S polypeptide having the amino acid sequence of SEQ ID NO: 1 or SEQ ID NO: 2. In embodiments, the heterogeneous SARS-COV-2 strain is a SARS-CoV-2 virus comprising a CoV S polypeptide with between about 95% and about 99.9% identity to a CoV S polypeptide having the amino acid sequence of SEQ ID NO: 1 or SEQ ID NO: 2. In embodiments, the heterogeneous SARS-COV-2 strain is a SARS-COV-2 virus comprising a CoV S polypeptide with between about 95% and about 99.8% identity to a CoV S polypeptide having the amino acid sequence of SEQ ID NO: 1 or SEQ ID NO: 2. In embodiments, the heterogeneous SARS-COV-2 strain is a SARS-COV-2 virus comprising a CoV S polypeptide with between about 95% and about 99% identity to a CoV S polypeptide having the amino acid sequence of SEQ ID NO: 1 or SEQ ID NO: 2. In embodiments, the heterogeneous SARS-COV-2 strain has a World Health Organization Label of alpha, beta, gamma, delta, epsilon, eta, iota, kappa, zeta, mu, or omicron. In embodiments, the heterogenous SARS-COV-2 strain has a PANGO lineage selected from the group consisting of B.1.1.529; BA.1, BA.1.1, BA.2, BA.3, BA.4, BA.5, B.1.1.7, B. 1.351, P.1, B.1.617.2, AY, B.1.427, B.1.429, B.1.525, B.1.526, B.1.617.1, B.1.617.3, P.2, B. 1.621, or B.1.621.1. The following document describes the Pango lineage designation and is incorporated by reference herein in its entirety: O'Toole et al. BMC Genomics, 23, 121 (2022).

[0071] In embodiments, the heterogeneous SARS-COV-2 strain has a World Health Organization Label of omicron. In embodiments, the heterogeneous SARS-COV-2 strain with a World Health Organization Label of omicron has at least 35 modifications compared to the wild-type SARS-CoV-2 S polypeptide of SEQ ID NO: 2. In embodiments, the heterogenous SARS-COV-2 strain with a World Health Organization Label of omicron has from 35 to 55, from 35 to 65, from 35 to 75, from 35 to 85, from 35 to 95, or from 35 to 105 modifications compared to the wild-type SARS-COV-2 S polypeptide of SEQ ID NO: 2. In embodiments, the modifications are selected from the group consisting of T6I, T6R, A14S, A54V, V70A, T82I, G129D, H133Q, K134E, W139R, E143G, F144L, Q170E, 1197V, L199I, V200E, V200G, G239V, G244S, G326D, G326H, R333T, L355I, S358F, S358L, S360P, S362F, T363A, D392N, R395S, K404N, N427K, K43IT, V432P, G433S, L439R, L439Q, N447K, S464N, T465K, E471A, F473V, F473S, F477S, Q480R, G483S, Q485R, N488Y, Y492H, T534K, T5911, D601G, G626V, H642Y, N645S, N666K, P668H, S691L, N751K, D783Y, N843K, Q941H, N956K, L968F, D1186N, deletion of amino acid 11, deletion of amino acid 12, deletion of amino acid 13, deletion of amino acid 56, deletion of amino acid 57, deletion of amino acid 130, deletion of amino acid 131, deletion of amino acid 132, deletion of amino acid 144, deletion of amino acid 145, deletion of amino acid 198, and insertion of a tripeptide having the amino acid sequence of EPE between amino acids 214 and 215, and combinations thereof.

[0072] In embodiments, the CoV S polypeptide of the variant comprises a combination of modifications selected from the group consisting of:
[0073] (i) A54V, T82I, G129D, L199I, G326D, S358L, S360P, S362F, K404N, N427K, G433S, S464N, T465K, E471A, Q480R, G483S, Q485R, N488Y, Y492H, T534K, D601G, H642Y, N666K, P668H, N751K, D783Y, N843K, Q941H, N956K, L968F, deletion of amino acid 56, deletion of amino acid 57, deletion of amino acid 130, deletion of amino acid 131, deletion of amino acid 132, deletion of amino acid 198, and insertion of a tripeptide having the amino acid sequence of EPE between amino acids 214 and 215;
[0074] (ii) T6I, A14S, G129D, V200G, G326D, S358F, S360P, S362F, T363A, D392N, R395S, K404N, N427K, S464N, T465K, E471A, Q480R, Q485R, N488Y, Y492H, D601G, H642Y, N666K, P668H, N751K, D783Y, Q941H, N956K, deletion of amino acid 11, deletion of amino acid 12, and deletion of amino acid 13;
[0075] (iii) T6R, A14S, T82I, G129D, E143G, L199I, G326D, S358L, S360P, K404N, N427K, G433S, S464N, T465K, E471A, Q480R, G483S, Q485R, N488Y, Y492H, T534K, D601G, H642Y, N666K, P668H, N751K, D783Y, N843K, Q941H, N956K, L968F, deletion of amino acid 144, deletion of amino acid 145, deletion of amino acid 198, and insertion of a tripeptide having the amino acid sequence of EPE between amino acids 214 and 215;
[0076] (iv) T6I, A14S, G129D, V200G, G326D, S358F, S360P, S362F, T363A, D392N, K404N, N427K, L439Q, S464N, T465K, E471A, Q480R, Q485R, N488Y, Y492H, D601G, H642Y, N666K, P668H, S691L, N751K, D783Y, Q941H, N956K, deletion of amino acid 11, deletion of amino acid 12, and deletion of amino acid 13;
[0077] (v) T6I, A14S, G129D, V200G, G326D, S358F, S360P, S362F, T363A, D392N, S464N, T465K, E471A, Q480R, Q485R, N488Y, Y492H, D601G, H642Y, N666K, P668H, D783Y, Q941H, N956K, deletion of amino acid 11, deletion of amino acid 12, and deletion of amino acid 13;
[0078] (vi) T6I, A14S, G129D, V200G, G326D, S358F, S360P, S362F, T363A, D392N, R395S, K404N, D601G, H642Y, N645S, N666K, N751K, D783Y, Q941H, N956K, deletion of amino acid 11, deletion of amino acid 12, deletion of amino acid 13, deletion of amino acid 56, and deletion of amino acid 57;
[0079] (vii) V3G, T6I, A14S, G129D, V200G, G326D, S358F, S360P, S362F, T363A, D392N, R395S, K404N, L439R, S464N, T465K, E471A, F473V, Q485R, N488Y, Y492H, D601G, G626V, H642Y, N666K, P668H, N751K, D783Y, Q941H, N956K, deletion of amino acid 11, deletion of amino acid 12, deletion of amino acid 13, deletion of amino acid 56, and deletion of amino acid 57;
[0080] (viii) V3G, T6I, A14S, G129D, V200G, G326D, S358F, S360P, S362F, T363A, D392N, R395S, K404N, N427K, L439R, S464N, T465K, E471A, F473V, Q485R, N488Y, Y492H, D601G, H642Y, N666K, P668H, N751K, D783Y, Q941H, N956K, deletion of amino acid 11, deletion of amino acid 12, deletion of amino acid 13, deletion of amino acid 56, and deletion of amino acid 57;
[0081] (ix) T6I, A14S, G129D, V200G, G326D, S358F, S360P, S362F, T363A, D392N, R395S, K404N, N427K, L439R, S464N, T465K, E471A, F473V, Q485R, N488Y, Y492H, D601G, H642Y, N666K, P668H, N751K, D783Y, Q941H, N956K, deletion of amino acid 11, deletion of amino acid 12, deletion of amino acid 13, deletion of amino acid 56, and deletion of amino acid 57;
[0082] (x) T6I, A14S, G129D, K134E, W139R, F144L, 1197V, V200G, G244S, G326H, S358F, S360P, S362F, T363A, D392N, R395S, K404N, N427K, G433S, N447K, S464N, T465K, E471A, Q485R, N488Y, Y492H, D601G, H642Y, N666K, P668H, N751K, D783Y, Q941H, N956K, deletion of amino acid 11, deletion of amino acid 12, and deletion of amino acid 13;
[0083] (xi) T6I, A14S, G129D, K134E, W139R, F144L, 1197V, V200G, G244S, G326H, R333T, S358F, S360P, S362F, T363A, D392N, R395S, K404N, N427K, G433S, L439R, N447K, S464N, T465K, E471A, F473S, Q485R, N488Y, Y492H, T5911, D601G, H642Y, N666K, P668H, N751K, D783Y, Q941H, N956K, D1186N, deletion of amino acid 11, deletion of amino acid 12, and deletion of amino acid 13;
[0084] (xii) T6I, A14S, G129D, V200G, G326D, R333T, S358F, S360P, S362F, T363A, D392N, R395S, K404N, N427K, L439R, S464N, T465K, E471A, F473V, Q485R, N488Y, Y492H, D601G, H642Y, N645S, N666K, P668H, N751K, D783Y, Q941H, N956K, deletion of amino acid 11, deletion of amino acid 12, deletion of amino acid 13, deletion of amino acid 56, and deletion of amino acid 57;
[0085] (xiii) T6I, A14S, G129D, V200G, G326D, R333T, S358F, S360P, S362F, T363A, D392N, R395S, K404N, N427K, L439R, S464N, T465K, E471A, F473V, Q485R, N488Y, Y492H, D601G, H642Y, N666K, P668H, N751K, D783Y, Q941H, N956K, deletion of amino acid 11, deletion of amino acid 12, deletion of amino acid 13, deletion of amino acid 56, and deletion of amino acid 57;
[0086] (xiv) T6I, A14S, V70A, G129D, H133Q, Q170E, V200E, G239V, G326H, R333T, L3551, S358F, S360P, S362F, T363A, D392N, R395S, K404N, N427K, V432P, G433S, N447K, S464N, T465K, E471A, F473S, F477S, Q485R, N488Y, Y492H, D601G, H642Y, N666K, P668H, N751K, D783Y, Q941H, N956K, deletion of amino acid 11, deletion of amino acid 12, deletion of amino acid 13, and deletion of amino acid 131;
[0087] (xv) T6I, A14S, G129D, H133Q, Q170E, V200E, G326H, R333T, L355I, S358F, S360P, S362F, T363A, D392N, R395S, K404N, N427K, V432P, G433S, N447K, S464N, T465K, E471A, F473S, F477S, Q485R, N488Y, Y492H, D601G, H642Y, N666K, P668H, N751K, D783Y, Q941H, N956K, deletion of amino acid 11, deletion of amino acid 12, deletion of amino acid 13, deletion of amino acid 56, deletion of amino acid 57, and deletion of amino acid 131;
[0088] (xvi) T6I, A14S, G129D, V200G, G326D, R333T, S358F, S360P, S362F, T363A, D392N, R395S, K404N, N427K, K431T, L439R, N447K, S464N, T465K, E471A, F473V, Q485R, N488Y, Y492H, D601G, H642Y, N666K, P668H, N751K, D783Y, Q941H, N956K, deletion of amino acid 11, deletion of amino acid 12, deletion of amino acid 13, deletion of amino acid 56, and deletion of amino acid 57;
[0089] (xvii) T6I, A14S, G129D, V200G, G326D, S358F, S360P, S362F, T363A, D392N, R395S, K404N, N427K, K431T, L439R, N447K, S464N, T465K, E471A, F473V, Q485R, N488Y, Y492H, D601G, H642Y, N666K, P668H, N751K, D783Y, Q941H, N956K, deletion of amino acid 11, deletion of amino acid 12, deletion of amino acid 13, deletion of amino acid 56, and deletion of amino acid 57; and
[0090] (xviii) T6I, A14S, G129D, V200G, G326D, R333T, S358F, S360P, S362F, T363A, D392N, R395S, K404N, N427K, L439R, S464N, T465K, E471A, F473V, Q485R, N488Y, Y492H, D601G, H642Y, N666K, P668H, N751K, D783Y, Q941H, N956K, deletion of amino acid 11, deletion of amino acid 12, deletion of amino acid 13, deletion of amino acid 56, deletion of amino acid 57, and deletion of amino acid 131;
[0091] (xix) deletion of amino acid 56, deletion of amino acid 57, and deletion of amino acid 131, N488Y, A557D, D601G, P668H or P668R, T7031, S969A, and D1105H;
[0092] (xx) D67A, K404N, E471K, N488Y, D601G, and A688V;
[0093] (xxi) D67A, D202G, L229H, K404N, E471K, N488Y, D601G, and A688V;
[0094] (xxii) D67A, D202G, deletion of 1, 2, or 3 amino acids of amino acids 228-230, K404N, E471K, N488Y, D601G, and A688V;
[0095] (xxiii) D67A, L229H, R2331, N488Y, K404N, E471K, D601G, and A688V;
[0096] (xxiv) L5F, T7N, P13S, D125Y, R177S, K404T, E471K, N488Y, D601G, H642Y, T1014I, and V1163F;
[0097] (xxv) W139C and L439;
[0098] (xxvi) deletion of amino acid 144, deletion of amino acid 145, T6R, E143G, L439R, T465K, D601G, P668R, and D937N;
[0099] (xxvii) deletion of amino acid 144, deletion of amino acid 145, T6R, G129D, E143G, L439R, T465K, D601G, P668R, and D937N;
[0100] (xxviii) deletion of amino acid 144, deletion of amino acid 145, T6R, T82I, G129D, Y132H, E143G, A209V, K404N L439R, T465K, D601G, P668R, and D937N;
[0101] (xxix) deletion of amino acid 144, deletion of amino acid 145, T6R, G129D, E143G, W245I, K404N, N426K, L439R, T465K, E471K, N488Y, D601G, P668R, and D937N;
[0102] (xxx) deletion of amino acid 144, deletion of amino acid 145, T6R, W51H, H53W, G129D, E143G, D200V, L201R, W245I, K404N, N426K, L439R, T465K, E471K, N488Y, D601G, P668R, and D937N;
[0103] (xxxi) deletion of amino acid 144, deletion of amino acid 145, T6R, G129D, E143G, K404N, L439R, T465K, E471Q, D601G, P668R, and D937N;
[0104] (xxxii) Q39R, A54V, E471K; D601G, Q664H, F875L, and deletion of 1, 2, 3, or 4 of amino acids 56, 57, 131, 132;
[0105] (xxxiii) T82I, D240G, E471K, D601G, and A688V;
[0106] (xxxiv) L439R, E471Q, D601G, P668R, and Q1058H;
[0107] (xxxv) G62V, T63I, R233N, L439Q, F477S, D601G, T846N, and deletion of 1, 2, 3, 4, 5, or 6 of amino acids 234-240;
[0108] (xxxvi) T82I, Y131S, Y132N, R333K, E471K, N488Y, D601G, P668H, and D937N; and
[0109] (xxxvii) G129D, G326D, S360P, S362F, K404N, N427K, T465K, E471A or E471K, Q480K or Q480R, Q485R, N488Y, Y492H, D601G, H642Y, N666K, P668H, N751K, D783Y, Q941H, and N953K;
[0110] (xxxviii) F456L, T572I, F59S, R346T, A1087S or A475V;
[0111] wherein the amino acids of the CoV S glycoprotein are numbered with respect to a polypeptide having the sequence of SEQ ID NO: 1 or SEQ ID NO: 2.

[0112] The term “efficacy” of an immunogenic composition or vaccine composition described herein refers to the percentage reduction of disease (e.g., COVID-19) in a group administered an immunogenic composition as compared to a group that is not administered the immunogenic composition. In embodiments, efficacy (E) is calculated using the following equation: E (%)=(1−RR)×100, where RR=relative risk of incidence rates between the group administered the immunogenic composition and the group that is not administered the immunogenic composition. In embodiments, immunogenic compositions described herein have an efficacy against a SARS-CoV-2 virus or heterogeneous SARS-COV-2 strain(s) that is at least about 50%, at least about 55%, at least about 60%, at least about 65%, at least about 70%, at least about 75%, at least about 80%, at least about 85%, at least about 90%, at least about 91%, at least about 92%, at least about 93%, at least about 94%, at least about 95%, at least about 96%, at least about 97%, at least about 98%, at least about 99%, between about 50% and about 99%, between about 50% and about 98%, between about 60% and about 99%, between about 60% and about 98%, between about 70% and about 98%, between about 70% and about 95%, between about 70% and about 99%, between about 80% and about 99%, between about 80% and about 98%, between about 80% and about 95%, between about 85% and about 99%, between about 85% and about 98%, between about 85% and about 95%, between about 90% and about 95%, between about 90% and 98%, or between about 90% and about 99%.

### Compositions Containing Coronavirus (CoV) Spike(S) Proteins

[0113] The disclosure provides coronavirus (CoV) Spike(S) polypeptides, including naturally and non-naturally occurring polypeptides, nanoparticles containing CoV S polypeptides, and immunogenic compositions and vaccine compositions containing either CoV S polypeptides or nanoparticles containing CoV S polypeptides. In embodiments, provided herein are methods of using CoV S polypeptides, nanoparticles, immunogenic compositions, and vaccine compositions to stimulate an immune response against a SARS-COV-2 virus or a heterogeneous SARS-COV-2 strain. In embodiments, the heterogeneous SARS-COV-2 strain has a PANGO lineage selected from the group consisting of B.1.1.529; BA.1, BA.1.1, BA.2, BA.3, BA.4, BA.5, B.1.1.7, B.1.351, P.1, B.1.617.2, AY, B.1.427, B.1.429, B.1.525, B.1.526, B.1.617.1, B.1.617.3, P.2, B.1.621, or B.1.621.1. In embodiments, the heterogeneous SARS-COV-2 strain has a World Health Organization label of alpha, beta, gamma, delta, epsilon, eta, iota, kappa, zeta, mu, or omicron.

[0114] Also provided herein are methods of manufacturing the nanoparticles and vaccine compositions. Advantageously, the methods provide nanoparticles that are substantially free from contamination by other proteins, such as proteins associated with recombinant expression of proteins in insect cells. In embodiments, expression occurs in baculovirus/Sf9 or baculovirus/Sf22a systems.

### CoV S Polypeptide Antigens

[0115] The immunogenic compositions of the disclosure contain from about 1 to about 15, from about 2 to about 15, from about 3 to about 15, from about 3 to about 12, from about 4 to about 6, from about 3 to about 7, from about 4 to about 12, from about 5 to about 8, from about 6 to about 9, or from about 5 to 10 non-naturally occurring CoV S polypeptides. In embodiments, the immunogenic compositions comprise 1, 2, 3, 4, 5, 6, 7, 8, 9, 10, 11, 12, 13, 14, 15, 16, 17, 18, 19, 20, 21, 22, 23, 24, or 25 different CoV S polypeptides. In embodiments, the immunogenic compositions comprise five non-naturally occurring CoV S polypeptides. The CoV S polypeptides may be derived from coronaviruses, including but not limited to SARS-COV-2, for example from SARS-COV-2, from MERS CoV, and from SARS COV.

[0116] In embodiments, the CoV S polypeptides are derived from SARS-COV-2. In embodiments, the CoV S polypeptide is derived from a heterogeneous SARS-COV-2 strain. The SARS-COV-2 S protein has a four amino acid insertion in the S1/S2 cleavage site resulting in a polybasic RRAR furin-like cleavage motif. The SARS-COV-2 S protein is synthesized as an inactive precursor (SO) that is proteolytically cleaved at the furin cleavage site into S1 and S2 subunits which remain non-covalently linked to form prefusion trimers. The S2 domain of the SARS-COV-2 S protein comprises a fusion peptide (FP), two heptad repeats (HR1 and HR2), a transmembrane (TM) domain, and a cytoplasmic tail (CT). The S1 domain of the SARS-COV-2 S protein folds into four distinct domains: the N-terminal domain (NTD) and the C-terminal domain, which contains the receptor binding domain (RBD) and two subdomains SD1 and SD2. The prefusion SARS-COV-2 S protein trimers undergo a structural rearrangement from a prefusion to a postfusion conformation upon S-protein receptor binding and cleavage.

[0117] In embodiments, the CoV S polypeptides are glycoproteins, due to post-translational glycosylation. The glycoproteins comprise one or more domains, including a signal peptide, an S1 subunit, an S2 subunit, a NTD, a, RBD, two subdomains (SD1 and SD2, labeled SD1/2 in FIGS. 1A-B and referred to as “SD1/2” herein), an intact or modified fusion peptide, an HR1 domain, an HR2 domain, a TM, and a CD. In embodiments, the amino acids for each domain are given in FIG. 1A (shown according to SEQ ID NO: 1), FIG. 1B (shown according to SEQ ID NO: 2).

[0118] In embodiments, the immunogenic composition comprises (i) a first CoV S polypeptide from SARS-COV-2 or from a heterogeneous SARS-COV-2 strain, wherein the first CoV S polypeptide contains an inactive furin cleavage site and mutations of amino acids 973 and 974, wherein the CoV S polypeptide is numbered according to SEQ ID NO: 2, and (ii) a second CoV S polypeptide with from about 1 to about 50 modifications compared to the first CoV S polypeptide. In embodiment, the immunogenic composition comprises a third, fourth, fifth, sixth, seventh, eight, ninth, or tenth CoV S polypeptide, wherein each CoV S polypeptide contains from about 1 to about 50 modifications compared to the first CoV S polypeptide.

[0119] In embodiments, the amino acid sequence of an S1 subunit, S2 subunit, NTD, RBD, SD1/2, fusion peptide, HR1 domain, HR2 domain, TM domain, or CD of the second, third, fourth, fifth, sixth, seventh, eight, ninth, or tenth CoV S polypeptide is independently at least 90%, at least 91%, at least 92%, at least 93%, at least 94%, at least 95%, at least 96%, at least 97%, at least 98%, at least 99%, or at least 99.5% identical to the amino acid sequence of the respective domain of the first polypeptide.

[0120] In embodiments, the amino acid sequence of an S1 subunit, S2 subunit, NTD, RBD, SD1/2, fusion peptide, HR1 domain, HR2 domain, TM domain, or CD of the second, third, fourth, fifth, sixth, seventh, eight, ninth, or tenth CoV S polypeptide contains up to about 1, up to about 2, up to about 3, up to about 4, up to about 5, up to about 6, up to about 7, up to about 8, up to about 9, up to about 10, up to about 15, up to about 20, up to about 25, up to about 30, from 1 to about 5, from about 2 to about 4, from about 3 to about 5, from about 3 to about 10, from about 5 to about 10, from about 6 to about 12, from about 8 to about 12, from about 10 to about 15, from about 15 to about 20, from about 12 to about 18, or from about 18 to about 25 modifications compared to the amino acid sequence of the respective domain of the first polypeptide.

[0121] In embodiments, the amino acid sequence of the second, third, fourth, fifth, sixth, seventh, eighth, nine, or tenth CoV S polypeptide is at least 90%, at least 91%, at least 92%, at least 93%, at least 94%, at least 95%, at least 96%, at least 97%, at least 98%, at least 99% identical to the amino acid sequence of the first CoV S polypeptide, but no more than 99.92% identical to the amino acid sequence of the first polypeptide.

[0122] In embodiments, the compositions described herein may be used to stimulate immune responses against SARS-COV-2 or a heterogeneous SARS-COV-2 strain.

[0123] In embodiments, the CoV S polypeptides described herein exist in a prefusion conformation. In embodiments, the CoV S polypeptides described herein comprise a flexible HR2 domain. Unless otherwise mentioned, the flexibility of a domain is determined by transition electron microscopy (TEM) and 2D class averaging. A reduction in electron density corresponds to a flexible domain.

CoV S Polypeptide Antigens-Modifications to S1 subunit

[0124] In embodiments, the CoV S polypeptides contain one or more modifications to the S1 subunit having an amino acid sequence of SEQ ID NO: 121.

[0125] The amino acid sequence of the S1 subunit (SEQ ID NO: 121) is shown below.

QCVNLTTRTQLPPAYTNSFTRGVYYPDKVFRSSVLHSTQDLFLPFFSNVT
WFHAIHVSGTNGTKRFDNPVLPFNDGVYFASTEKSNIIRGWIFGTTLDSK
TQSLLIVNNATNVVIKVCEFQFCNDPFLGVYYHKNNKSWMESEFRVYSSA
NNCTFEYVSQPFLMDLEGKQGNFKNLREFVFKNIDGYFKIYSKHTPINLV
RDLPQGFSALEPLVDLPIGINITRFQTLLALHRSYLTPGDSSSGWTAGAA
AYYVGYLQPRTFLLKYNENGTITDAVDCALDPLSETKCTLKSFTVEKGIY
QTSNFRVQPTESIVRFPNITNLCPFGEVFNATRFASVYAWNRKRISNCVA
DYSVLYNSASFSTFKCYGVSPTKLNDLCFTNVYADSFVIRGDEVRQIAPG
QTGKIADYNYKLPDDFTGCVIAWNSNNLDSKVGGNYNYLYRLFRKSNLKP
FERDISTEIYQAGSTPCNGVEGFNCYFPLQSYGFQPTNGVGYQPYRVVVL
SFELLHAPATVCGPKKSTNLVKNKCVNFNFNGLTGTGVLTESNKKFLPFQ
QFGRDIADTTDAVRDPQTLEILDITPCSFGGVSVITPGTNTSNQVAVLYQ
DVNCTEVPVAIHADQLTPTWRVYSTGSNVFQTRAGCLIGAEHVNNSYECD
IPIGAGICASYQTQTNSPRRAR

[0126] In embodiments, the CoV S polypeptides described herein comprise an S1 subunit with at least 90%, at least 91%, at least 92%, at least 93%, at least 94%, at least 95%, at least 96%, at least 97%, at least 98%, at least 99%, or at least 99.5%, identity to the S1 subunit of SEQ ID NO: 1 or SEQ ID NO: 2. The S1 subunit may have a deletion, an insertion, or mutation of up to about 1, up to about 2, up to about 3, up to about 4, up to about 5, up to about 10, up to about 15, up to about 20, up to about 25, up to about 30 amino acids, up to about 35 amino acids, up to about 40 amino acids, up to about 45 amino acids, or up to about 50 amino acids compared to the amino acid sequence of the S1 subunit of SEQ ID NO: 1 or SEQ ID NO: 2. The S1 subunit may have a deletion, an insertion, or mutation of between about 1 and about 5 amino acids, between about 3 and about 10 amino acids, between about 5 and 10 amino acids, between about 8 and 12 amino acids, between about 10 and 15 amino acids, between about 12 and 17 amino acids, between about 15 and 20 amino acids, between about 18 and 23 amino acids, between about 20 and 25 amino acids, between about 22 and about 27 amino acids, or between about 25 and 30 amino acids as compared to the S1 subunit of SEQ ID NO: 1 or SEQ ID NO: 2.

[0127] In embodiments, the S1 subunit may contain any combination of modifications shown in Table 1A.

TABLE 1A
Modifications to S1 (SEQ ID NO: 121)
* amino acids 14-685 of SEQ ID NO: 1 and amino
acids 1-672 of SEQ ID NO: 2

| Position | Position | Position | |
|---|---|---|---|
| within | within | within | |
| SEQ ID | SEQ ID | SEQ ID | |
| NO: 1 | NO: 2 | NO: 121 | Potential Modifications |
| 14-305 | 1-292 | 1-292 | deletion of up to about 1, 2, 3, 4, 5, |
| | | | 10, 20, 30, 40, 50, 60, 70, 80, 90, |
| | | | 100, 110, 120, 130, 140, 150, 160, 170, |
| | | | 180, 190, 200, 210, 220, 230, 240, 250, |
| | | | 260, 270, 280, 290, or 292 amino acids |
| 18 | 5 | 5 | mutation to phenylalanine |
| | | | mutation to tyrosine |
| | | | mutation to tryptophan |
| 19 | 6 | 6 | mutation to arginine |
| | | | mutation to lysine |
| | | | mutation to histidine |
| | | | mutation to isoleucine |
| 20 | 7 | 7 | mutation to asparagine |
| | | | mutation to glutamine |
| | | | mutation to isoleucine |
| | | | mutation to valine |
| 24 | 11 | 11 | mutation to serine |
| | | | mutation to threonine |
| | | | deletion |
| 25 | 12 | 12 | insertion of amino acids |
| | | | proline-proline-alanine |
| | | | (PPA) after amino acid 25 |
| | | | deletion |
| 26 | 13 | 13 | mutation to serine |
| | | | mutation to threonine |
| | | | deletion |
| 27 | 14 | 14 | mutation to serine |
| | | | mutation to threonine |
| 52 | 39 | 39 | mutation to arginine |
| | | | mutation to lysine |
| | | | mutation to histidine |
| 64 | 51 | 51 | mutation to histidine |
| | | | mutation to lysine |
| | | | mutation to arginine |
| 66 | 53 | 53 | mutation to tryptophan |
| | | | mutation to tyrosine |
| | | | mutation to phenylalanine |
| 67 | 54 | 54 | mutation to valine |
| | | | mutation to isoleucine |
| | | | mutation to leucine |
| 69 | 56 | 56 | Deletion of amino acid |
| 70 | 57 | 57 | Deletion of amino acid |
| | | | Mutation to phenylalanine |
| | | | Mutation to tyrosine |
| | | | Mutation to tryptophan |
| 75 | 62 | 62 | Mutation to valine |
| | | | Mutation to leucine |
| | | | Mutation to isoleucine |
| 76 | 63 | 63 | Mutation to isoleucine |
| | | | Mutation to valine |
| | | | Mutation to leucine |
| 80 | 67 | 67 | mutation to alanine |
| | | | mutation to glycine |
| 83 | 70 | 70 | mutation to alanine |
| 95 | 82 | 82 | mutation to beta branched amino acid |
| | | | mutation to isoleucine |
| | | | mutation to valine |
| 138 | 125 | 125 | mutation to tyrosine |
| | | | mutation to phenylalanine |
| | | | mutation to tryptophan |
| 142 | 129 | 129 | mutation to aspartic acid |
| | | | mutation to glutamic acid |
| 143 | 130 | 130 | deletion of amino acid |
| 144 | 131 | 131 | Deletion of amino acid |
| | | | Mutation to serine |
| 145 | 132 | 132 | Deletion of amino acid |
| | | | Mutation to histidine |
| | | | Mutation to asparagine |
| | | | Mutation to glutamine |
| 146 | 133 | 133 | mutation to aromatic amino acid |
| | | | mutation to tyrosine |
| | | | mutation to phenylalanine |
| | | | mutation to tryptophan |
| | | | mutation to glutamine |
| 147 | 134 | 134 | mutation to glutamic acid |
| | | | mutation to aspartic acid |
| 152 | 139 | 139 | mutation to cysteine |
| | | | mutation to methionine |
| | | | mutation to serine |
| | | | mutation to threonine |
| | | | mutation to arginine |
| | | | mutation to lysine |
| 156 | 143 | 143 | mutation to glycine |
| | | | mutation to alanine |
| 157 | 144 | 144 | deletion of amino acid |
| | | | mutation to leucine |
| | | | mutation to isoleucine |
| | | | mutation to valine |
| | | | mutation to beta-branched amino acid |
| 158 | 145 | 145 | deletion of amino acid |
| 180 | 167 | 167 | mutation to beta-branched amino acid |
| | | | mutation to valine |
| | | | mutation to isoleucine |
| | | | mutation to leucine |
| 183 | 170 | 170 | mutation to glutamic acid |
| | | | mutation to aspartic acid |
| 190 | 177 | 177 | mutation to serine |
| | | | mutation to threonine |
| | | | mutation to cysteine |
| 210 | 197 | 197 | mutation to valine |
| | | | mutation to isoleucine |
| | | | mutation to leucine |
| | | | mutation to beta branched amino acid |
| 211 | 198 | 198 | mutation to isoleucine |
| | | | mutation to valine |
| | | | mutation to leucine |
| | | | mutation to beta branched amino acid |
| | | | deletion of amino acid |
| 212 | 199 | 199 | mutation to isoleucine |
| | | | mutation to valine |
| | | | mutation to leucine |
| | | | mutation to beta branched amino acid |
| | | | deletion of amino acid |
| 213 | 200 | 200 | mutation to valine |
| | | | mutation to leucine |
| | | | mutation to isoleucine |
| | | | mutation to beta branched amino acid |
| | | | mutation to proline |
| | | | mutation to glycine |
| | | | mutation to glutamic acid |
| | | | mutation to aspartic acid |
| 214 | 201 | 201 | mutation to arginine |
| | | | mutation to lysine |
| | | | mutation to histidine |
| | | | mutation to aspartic acid |
| | | | mutation to glutamic acid |
| | | | insertion of amino acids |
| | | | glutamic acid-proline- |
| | | | glutamic acid (EPE) after 214 |
| 215 | 202 | 202 | mutation to glycine |
| | | | mutation to alanine |
| | | | insertion of amino acids |
| | | | glutamic acid-proline- |
| | | | glutamic acid (EPE) after 215 |
| 222 | 209 | 209 | mutation to valine |
| | | | mutation to leucine |
| | | | mutation to isoleucine |
| 241-244 | 228-231 | 228-231 | deletion of 1, 2, 3, or 4 amino acids |
| 242 | 229 | 229 | mutation to histidine |
| | | | mutation to lysine |
| | | | mutation to arginine |
| 246 | 233 | 233 | mutation to beta-branched amino acid |
| | | | mutation to isoleucine |
| | | | mutation to valine |
| | | | mutation to threonine |
| | | | mutation to asparagine |
| 247 | 234 | 234 | deletion of amino acid |
| 248 | 235 | 235 | deletion of amino acid |
| 249 | 236 | 236 | deletion of amino acid |
| 250 | 237 | 237 | deletion of amino acid |
| 251 | 238 | 238 | deletion of amino acid |
| 252 | 239 | 239 | deletion of amino acid |
| | | | mutation to valine |
| | | | mutation to leucine |
| | | | mutation to isoleucine |
| | | | mutation to beta branched amino acid |
| | | | mutation to glycine |
| 253 | 240 | 240 | mutation to glycine |
| | | | deletion of amino acid |
| 257 | 244 | 244 | mutation to serine |
| | | | mutation to threonine |
| | | | mutation to asparagine |
| | | | mutation to glutamine |
| 258 | 245 | 245 | mutation to isoleucine |
| | | | mutation to valine |
| | | | mutation to leucine |
| | | | mutation to beta branched amino acid |
| 339 | 326 | 326 | mutation to aspartic acid |
| | | | mutation to glutamic acid |
| | | | mutation to histidine |
| 346 | 333 | 333 | mutation to lysine |
| | | | mutation to arginine |
| | | | mutation to histidine |
| | | | mutation to threonine |
| | | | mutation to serine |
| 368 | 355 | 355 | mutation to isoleucine |
| | | | mutation to leucine |
| | | | mutation to valine |
| | | | mutation to beta-branched amino acid |
| 371 | 358 | 358 | mutation to leucine |
| | | | mutation to isoleucine |
| | | | mutation to valine |
| | | | mutation to phenylalanine |
| 373 | 360 | 360 | mutation to proline |
| 375 | 362 | 362 | mutation to phenylalanine |
| | | | mutation to tyrosine |
| | | | mutation to tryptophan |
| 376 | 363 | 363 | mutation to alanine |
| | | | mutation to glycine |
| 405 | 392 | 392 | mutation to asparagine |
| | | | mutation to glutamine |
| 408 | 395 | 395 | mutation to serine |
| | | | mutation to threonine |
| 417 | 404 | 404 | mutation to asparagine |
| | | | mutation to threonine |
| | | | mutation to isoleucine |
| | | | mutation to valine |
| | | | mutation to serine |
| | | | mutation to glutamine |
| | | | mutation to beta-branched amino acid |
| 432 | 419 | 419 | mutation to lysine |
| | | | mutation to arginine |
| | | | mutation to histidine |
| 439 | 426 | 426 | mutation to lysine |
| | | | mutation to arginine |
| | | | mutation to histidine |
| 440 | 427 | 427 | mutation to lysine |
| | | | mutation to arginine |
| | | | mutation to histidine |
| 444 | 431 | 431 | mutation to threonine |
| | | | mutation to serine |
| 445 | 432 | 432 | mutation to proline |
| 446 | 433 | 433 | mutation to serine |
| | | | mutation to threonine |
| | | | mutation to asparagine |
| | | | mutation to glutamine |
| 452 | 439 | 439 | mutation to arginine |
| | | | mutation to lysine |
| | | | mutation to histidine |
| | | | mutation to glutamine |
| | | | mutation to asparagine |
| 453 | 440 | 440 | mutation to phenylalanine |
| | | | mutation to tryptophan |
| 456 | 443 | 443 | mutation to leucine |
| | | | mutation to valine |
| | | | mutation to isoleucine |
| 460 | 447 | 447 | mutation to lysine |
| | | | mutation to arginine |
| 477 | 464 | 464 | mutation to asparagine |
| | | | mutation to glutamine |
| 478 | 465 | 465 | mutation to lysine |
| | | | mutation to arginine |
| | | | mutation to histidine |
| 484 | 471 | 471 | mutation to alanine |
| | | | mutation to lysine |
| | | | mutation to arginine |
| | | | mutation to histidine |
| | | | mutation to glutamine |
| | | | mutation to asparagine |
| 486 | 473 | 473 | mutation to valine |
| | | | mutation to leucine |
| | | | mutation to isoleucine |
| | | | mutation to serine |
| | | | mutation to threonine |
| | | | mutation to proline |
| 490 | 477 | 477 | mutation to serine |
| | | | mutation to threonine |
| 493 | 480 | 480 | mutation to lysine |
| | | | mutation to arginine |
| | | | mutation to histidine |
| 494 | 481 | 481 | mutation to proline |
| 496 | 483 | 483 | mutation to serine |
| | | | mutation to threonine |
| 498 | 485 | 485 | mutation to lysine |
| | | | mutation to arginine |
| | | | mutation to histidine |
| 501 | 488 | 488 | mutation to tyrosine |
| | | | mutation to phenylalanine |
| | | | mutation to tryptophan |
| 505 | 492 | 492 | mutation to histidine |
| 521 | 508 | 508 | mutation to serine |
| | | | mutation to threonine |
| 547 | 534 | 534 | mutation to lysine |
| | | | mutation to arginine |
| | | | mutation to histidine |
| 570 | 557 | 557 | mutation to aspartic acid |
| | | | mutation to glutamic acid |
| 604 | 591 | 591 | mutation to isoleucine |
| | | | mutation to leucine |
| | | | mutation to valine |
| | | | mutation to beta branched amino acid |
| 613 | 600 | 600 | mutation to histidine |
| | | | mutation to lysine |
| | | | mutation to arginine |
| 614 | 601 | 601 | mutation to glycine |
| | | | mutation to alanine |
| 639 | 626 | 626 | mutation to valine |
| | | | mutation to leucine |
| | | | mutation to isoleucine |
| 655 | 642 | 642 | mutation to tyrosine |
| | | | mutation to phenylalanine |
| | | | mutation to tryptophan |
| 658 | 645 | 645 | mutation to serine |
| | | | mutation to threonine |
| 677 | 664 | 664 | mutation to histidine |
| 679 | 666 | 666 | mutation to lysine |
| | | | mutation to arginine |
| | | | mutation to histidine |
| 681 | 668 | 668 | mutation to histidine |
| | | | mutation to lysine |
| | | | mutation to arginine |
| 682-685 | 669-672 | 669-672 | inactive furin cleavage |
| | | | site (See Table 1E) |

[0128] CoV S Polypeptide Antigens-Modifications to S1 subunit-NTD

[0129] In embodiments, the CoV S polypeptides contain one or more modifications to the NTD. In embodiments, the NTD has an amino acid sequence of SEQ ID NO: 118, which corresponds to amino acids 14-305 of SEQ ID NO: 1 or amino acids 1-292 of SEQ ID NO: 2.

[0130] The amino acid sequence of an NTD (SEQ ID NO: 118) is shown below.

QCVNLTTRTQLPPAYTNSFTRGVYYPDKVFRSSVLHSTQDLFLPFFSNVT
WFHAIHVSGTNGTKRFDNPVLPFNDGVYFASTEKSNIIRGWIFGTTLDSK
TQSLLIVNNATNVVIKVCEFQFCNDPFLGVYYHKNNKSWMESEFRVYSSA
NNCTFEYVSQPFLMDLEGKQGNFKNLREFVFKNIDGYFKIYSKHTPINLV
RDLPQGFSALEPLVDLPIGINITRFQTLLALHRSYLTPGDSSSGWTAGAA
AYYVGYLQPRTFLLKYNENGTITDAVDCALDPLSETKCTLKS

[0131] In embodiments, the NTD has an amino acid sequence of SEQ ID NO: 45, which corresponds to amino acids 14 to 331 of SEQ ID NO: 1 or amino acids 1-318 of SEQ ID NO: 2. The amino acid sequence of an NTD (SEQ ID NO: 45) is shown below.

QCVNLTTRTQLPPAYTNSFTRGVYYPDKVFRSSVLHSTQDLFLPFFSNVT
WFHAIHVSGTNGTKRFDNPVLPFNDGVYFASTEKSNIIRGWIFGTTLDSK
TQSLLIVNNATNVVIKVCEFQFCNDPFLGVYYHKNNKSWMESEFRVYSSA
NNCTFEYVSQPFLMDLEGKQGNFKNLREFVFKNIDGYFKIYSKHTPINLV
RDLPQGFSALEPLVDLPIGINITRFQTLLALHRSYLTPGDSSSGWTAGAA
AYYVGYLQPRTFLLKYNENGTITDAVDCALDPLSETKCTLKSFTVEKGIY
QTSNFRVQPTESIVRFPN

[0132] In embodiments, the NTD and RBD overlap by up to about 1 amino acid, up to about 5 amino acids, up to about 10 amino acids, or up to about 20 amino acids.

[0133] In embodiments, an NTD as provided herein may be extended at the C-terminus by up to 5, up to 10, up to 15, up to 20, up to 25, or up to 30 amino acids.

[0134] In embodiments, the CoV S polypeptides described herein comprise a NTD with at least 95%, at least 96%, at least 97%, at least 98%, at least 99%, or at least 99.5%, identity to the NTD of SEQ ID NO: 1 or SEQ ID NO: 2. The NTD may have a deletion, an insertion, or mutation of up to about 1, up to about 2, up to about 3, up to about 4, up to about 5, up to about 10, up to about 15, up to about 20, up to about 25, or up to about 30 amino acids compared to the amino acid sequence of the NTD of SEQ ID NO: 1 or SEQ ID NO: 2. The NTD may have a deletion, an insertion, or mutation of between about 1 and about 5 amino acids, between about 3 and about 10 amino acids, between about 5 and 10 amino acids, between about 8 and 12 amino acids, between about 10 and 15 amino acids, between about 12 and 17 amino acids, between about 15 and 20 amino acids, between about 18 and 23 amino acids, between about 20 and 25 amino acids, between about 22 and about 27 amino acids, or between about 25 and 30 amino acids as compared to the NTD of SEQ ID NO: 1 or SEQ ID NO: 2.

[0135] In embodiments, the CoV S polypeptides contain a deletion of one or more amino acids from the N-terminal domain (NTD) (corresponding to amino acids 1-292 of SEQ ID NO: 2. In embodiments, the CoV S polypeptides contain a deletion of up to about 10, 20, 30, 40, 50, 60, 70, 80, 90, 100, 110, 120, 130, 140, 150, 160, 170, 180, 190, 200, 210, 220, 230, 240, 250, 260, 270, 280, 290, or 292 amino acids of the NTD.

[0136] In embodiments, the CoV S polypeptides contain a deletion of one or more amino acids from the NTD (corresponding to amino acids 1-318 of SEQ ID NO: 2). In embodiments, the CoV S polypeptides contain a deletion of amino acids 1-318 of the NTD of SEQ ID NO: 2. In embodiments, deletion of the NTD enhances protein expression of the CoV Spike(S) polypeptide. In embodiments, the CoV S polypeptides which have an NTD deletion have amino acid sequences represented by SEQ ID NOS: 46, 48, 49, 51, 52, and 54. In embodiments, the CoV S polypeptides which have an NTD deletion are encoded by an isolated nucleic acid sequence selected from the group consisting of SEQ ID NO: 47, SEQ ID NO: 50, and SEQ ID NO: 53.

[0137] In embodiments, the NTD may contain any combination of modifications shown in Table 1B. The modifications are shown with respect to SEQ ID NO: 2, the mature S polypeptide sequence for reference.

TABLE 1B
Modifications to NTD (SEQ ID NO: 118)

| Position within | SEQ ID NO: 2 | SEQ ID NO: 118 or | |
|---|---|---|---|
| SEQ ID NO: 1 | residue | SEQ ID NO: 45 residue | Modifications |
| 14-305 | 1-292 | 1-292 | deletion of up to about 1, 2, 3, 4, 5, 10, 20, 30, 40, |
| | | | 50, 60, 70, 80, 90, 100, 110, 120, 130, 140, 150, |
| | | | 160, 170, 180, 190, 200, 210, 220, 230, 240, 250, |
| | | | 260, 270, 280, 290, or 292 amino acids |
| 18 | 5 | 5 | mutation to phenylalanine |
| | | | mutation to tyrosine |
| | | | mutation to tryptophan |
| 19 | 6 | 6 | mutation to arginine |
| | | | mutation to lysine |
| | | | mutation to histidine |
| | | | mutation to isoleucine |
| 20 | 7 | 7 | mutation to asparagine |
| | | | mutation to glutamine |
| | | | mutation to isoleucine |
| | | | mutation to valine |
| 24 | 11 | 11 | mutation to serine |
| | | | mutation to threonine |
| | | | deletion |
| 25 | 12 | 12 | insertion of amino acids proline-proline-alanine |
| | | | (PPA) after amino acid 25 |
| | | | deletion |
| 26 | 13 | 13 | mutation to serine |
| | | | mutation to threonine |
| | | | deletion |
| 27 | 14 | 14 | mutation to serine |
| | | | mutation to threonine |
| 52 | 39 | 39 | mutation to arginine |
| | | | mutation to lysine |
| | | | mutation to histidine |
| 64 | 51 | 51 | mutation to histidine |
| | | | mutation to lysine |
| | | | mutation to arginine |
| 66 | 53 | 53 | mutation to tryptophan |
| | | | mutation to tyrosine |
| | | | mutation to phenylalanine |
| 67 | 54 | 54 | mutation to valine |
| | | | mutation to isoleucine |
| | | | mutation to leucine |
| 69 | 56 | 56 | deletion of amino acid |
| 70 | 57 | 57 | deletion of amino acid |
| | | | mutation to phenylalanine |
| | | | mutation to tyrosine |
| | | | mutation to tryptophan |
| 75 | 62 | 62 | mutation to valine |
| | | | mutation to leucine |
| | | | mutation to isoleucine |
| 76 | 63 | 63 | mutation to isoleucine |
| | | | mutation to valine |
| | | | mutation to leucine |
| 80 | 67 | 67 | mutation to alanine |
| | | | mutation to glycine |
| 83 | 70 | 70 | mutation to alanine |
| 95 | 82 | 82 | mutation to beta branched amino acid |
| | | | mutation to isoleucine |
| | | | mutation to valine |
| 138 | 125 | 125 | mutation to tyrosine |
| | | | mutation to phenylalanine |
| | | | mutation to tryptophan |
| 142 | 129 | 129 | mutation to aspartic acid |
| | | | mutation to glutamic acid |
| 143 | 130 | 130 | deletion of amino acid |
| 144 | 131 | 131 | deletion of amino acid |
| | | | mutation to serine |
| 145 | 132 | 132 | deletion of amino acid |
| | | | mutation to histidine |
| | | | mutation to asparagine |
| | | | mutation to glutamine |
| 146 | 133 | 133 | mutation to aromatic amino acid |
| | | | mutation to tyrosine |
| | | | mutation to phenylalanine |
| | | | mutation to tryptophan |
| | | | mutation to glutamine |
| | | | mutation to asparagine |
| 147 | 134 | 134 | mutation to glutamic acid |
| | | | mutation to aspartic acid |
| 152 | 139 | 139 | mutation to cysteine |
| | | | mutation to methionine |
| | | | mutation to serine |
| | | | mutation to threonine |
| | | | mutation to arginine |
| | | | mutation to lysine |
| 156 | 143 | 143 | mutation to glycine |
| | | | mutation to alanine |
| 157 | 144 | 144 | deletion of amino acid |
| | | | mutation to leucine |
| 158 | 145 | 145 | deletion of amino acid |
| 180 | 167 | 167 | mutation to isoleucine |
| | | | mutation to valine |
| | | | mutation to leucine |
| | | | mutation to beta branched amino acid |
| 183 | 170 | 170 | mutation to glutamic acid |
| | | | mutation to aspartic acid |
| 190 | 177 | 177 | mutation to serine |
| | | | mutation to threonine |
| | | | mutation to cysteine |
| 210 | 197 | 197 | mutation to valine |
| | | | mutation to isoleucine |
| | | | mutation to leucine |
| | | | mutation to beta branched amino acid |
| 211 | 198 | 198 | mutation to isoleucine |
| | | | mutation to valine |
| | | | mutation to leucine |
| | | | mutation to beta branched amino acid |
| | | | deletion of amino acid |
| 212 | 199 | 199 | mutation to isoleucine |
| | | | mutation to valine |
| | | | mutation to leucine |
| | | | mutation to beta branched amino acid |
| | | | deletion of amino acid |
| 213 | 200 | 200 | mutation to valine |
| | | | mutation to leucine |
| | | | mutation to isoleucine |
| | | | mutation to beta branched amino acid |
| | | | mutation to proline |
| | | | mutation to glycine |
| | | | mutation to glutamic acid |
| | | | mutation to aspartic acid |
| 214 | 201 | 201 | mutation to arginine |
| | | | mutation to lysine |
| | | | mutation to histidine |
| | | | mutation to aspartic acid |
| | | | mutation to glutamic acid |
| | | | insertion of amino acids glutamic acid-proline- |
| | | | glutamic acid (EPE) after 214 |
| 215 | 202 | 202 | mutation to glycine |
| | | | mutation to alanine |
| | | | insertion of amino acids glutamic acid-proline- |
| | | | glutamic acid (EPE) after 215 |
| 222 | 209 | 209 | mutation to valine |
| | | | mutation to leucine |
| | | | mutation to isoleucine |
| 241-244 | 228-231 | 228-231 | deletion of 1, 2, 3, or 4 amino acids |
| 242 | 229 | 229 | mutation to histidine |
| | | | mutation to lysine |
| | | | mutation to arginine |
| 246 | 233 | 233 | mutation to beta-branched amino acid |
| | | | mutation to isoleucine |
| | | | mutation to valine |
| | | | mutation to threonine |
| | | | mutation to asparagine |
| 247 | 234 | 234 | deletion of amino acid |
| 248 | 235 | 235 | deletion of amino acid |
| 249 | 236 | 236 | deletion of amino acid |
| 250 | 237 | 237 | deletion of amino acid |
| 251 | 238 | 238 | deletion of amino acid |
| 252 | 239 | 239 | deletion of amino acid |
| | | | mutation to valine |
| | | | mutation to isoleucine |
| | | | mutation to leucine |
| | | | mutation to beta branched amino acid |
| | | | mutation to glycine |
| 253 | 240 | 240 | mutation to glycine |
| | | | deletion of amino acid |
| 257 | 244 | 244 | mutation to serine |
| | | | mutation to threonine |
| 258 | 245 | 245 | mutation to isoleucine |
| | | | mutation to valine |
| | | | mutation to leucine |
| | | | mutation to beta branched amino acid |

*amino acids 14-305 of SEQ ID NO: 1 and amino acids 1-292 of SEQ ID NO: 2

### CoV S Polypeptide Antigens-Modifications to S1 Subunit-RBD

[0138] In embodiments, the CoV S polypeptides contain one or more modifications to the RBD.

[0139] In embodiments, the RBD has an amino acid sequence of SEQ ID NO: 126, which corresponds to amino acids 331-527 of SEQ ID NO: 1 or amino acids 318-514 of SEQ ID NO: 2.

[0140] The amino acid sequence of the RBD (SEQ ID NO: 126) is shown below:

NITNLCPFGEVFNATRFASVYAWNRKRISNCVADYSVLYNSASFSTFKCY
GVSPTKLNDLCFTNVYADSFVIRGDEVRQIAPGQTGKIADYNYKLPDDFT
GCVIAWNSNNLDSKVGGNYNYLYRLFRKSNLKPFERDISTEIYQAGSTPC
NGVEGFNCYFPLQSYGFQPTNGVGYQPYRVVVLSFELLHAPATVCGP

[0141] In embodiments, the RBD has an amino acid sequence of SEQ ID NO: 116, which corresponds to amino acids 335-530 of SEQ ID NO: 1 or amino acids 322-517 of SEQ ID NO: 2.

[0142] The amino acid sequence of the RBD (SEQ ID NO: 116) is shown below.

LCPFGEVFNATRFASVYAWNRKRISNCVADYSVLYNSASFSTFKCYGVSP
TKLNDLCFTNVYADSFVIRGDEVRQIAPGQTGKIADYNYKLPDDFTGCVI
AWNSNNLDSKVGGNYNYLYRLFRKSNLKPFERDISTEIYQAGSTPCNGVE
GFNCYFPLQSYGFQPTNGVGYQPYRVVVLSFELLHAPATVCGPKKS

[0143] In embodiments, an RBD as provided herein may be extended at the N-terminus or C-terminus by up to 1 amino acid, up to 5 amino acids, up to 10 amino acids, up to 15 amino acids, up to 20 amino acids, up to 25 amino acids, or up to 30 amino acids.

[0144] In embodiments, the CoV S polypeptides described herein comprise a RBD with at least 95%, at least 96%, at least 97%, at least 98%, at least 99%, or at least 99.5%, identity to the RBD of SEQ ID NO: 1 or SEQ ID NO: 2. The RBD may have a deletion, an insertion, or mutation of up to about 1, up to about 2, up to about 3, up to about 4, up to about 5, up to about 10, up to about 15, up to about 20, up to about 25, or up to about 30 amino acids compared to the amino acid sequence of the RBD of SEQ ID NO: 1 or SEQ ID NO: 2. The RBD may have a deletion, an insertion, or mutation of between about 1 and about 5 amino acids, between about 3 and about 10 amino acids, between about 5 and 10 amino acids, between about 8 and 12 amino acids, between about 10 and 15 amino acids, between about 12 and 17 amino acids, between about 15 and 20 amino acids, between about 18 and 23 amino acids, between about 20 and 25 amino acids, between about 22 and about 27 amino acids, or between about 25 and 30 amino acids as compared to the RBD of SEQ ID NO: 1 or SEQ ID NO: 2.

[0145] In embodiments, the CoV S polypeptide has at least one, at least two, at least three, at least four, at least four, at least 5, at least 6, at least 7, at least 8, at least 9, at least 10, at least 11, at least 12, at least 13, at least 14, at least 15, at least 16, at least 17, at least 18, at least 19, or at least 20 mutations in the RBD. In embodiments, the RBD may contain any combination of modifications as shown in Table 1C.

TABLE 1C
Modifications to RBD (SEQ ID NO: 126)

| Position within | Position within | Position within | |
|---|---|---|---|
| SEQ ID NO: 1 | SEQ ID NO: 2 | SEQ ID NO: 126 | Potential Modifications |
| 339 | 326 | 9 | mutation to aspartic acid |
| | | | mutation to glutamic acid |
| | | | mutation to histidine |
| 346 | 333 | 16 | mutation to lysine |
| | | | mutation to arginine |
| | | | mutation to histidine |
| | | | mutation to threonine |
| | | | mutation to serine |
| 368 | 355 | 38 | mutation to isoleucine |
| | | | mutation to leucine |
| | | | mutation to valine |
| | | | mutation to beta-branched amino acid |
| 371 | 358 | 41 | mutation to leucine |
| | | | mutation to isoleucine |
| | | | mutation to valine |
| | | | mutation to phenylalanine |
| | | | mutation to tyrosine |
| | | | mutation to tryptophan |
| 373 | 360 | 43 | mutation to proline |
| 375 | 362 | 45 | mutation to phenylalanine |
| | | | mutation to tyrosine |
| | | | mutation to tryptophan |
| 376 | 363 | 46 | mutation to alanine |
| | | | mutation to glycine |
| 405 | 392 | 75 | mutation to asparagine |
| | | | mutation to glutamine |
| 408 | 395 | 78 | mutation to serine |
| | | | mutation to threonine |
| 417 | 404 | 87 | mutation to asparagine |
| | | | mutation to threonine |
| | | | mutation to isoleucine |
| | | | mutation to valine |
| | | | mutation to serine |
| | | | mutation to glutamine |
| | | | mutation to beta-branched amino acid |
| 432 | 419 | 102 | mutation to lysine |
| | | | mutation to arginine |
| | | | mutation to histidine |
| 439 | 426 | 109 | mutation to lysine |
| | | | mutation to arginine |
| | | | mutation to histidine |
| 440 | 427 | 110 | mutation to lysine |
| | | | mutation to arginine |
| | | | mutation to histidine |
| 444 | 431 | 114 | mutation to threonine |
| | | | mutation to serine |
| 445 | 432 | 115 | mutation to proline |
| 446 | 433 | 116 | mutation to serine |
| | | | mutation to threonine |
| 452 | 439 | 122 | mutation to arginine |
| | | | mutation to lysine |
| | | | mutation to histidine |
| | | | mutation to glutamine |
| | | | mutation to asparagine |
| 453 | 440 | 123 | mutation to phenylalanine |
| | | | mutation to tryptophan |
| 456 | 443 | 126 | mutation to leucine |
| | | | mutation to isoleucine |
| | | | mutation to valine |
| 460 | 447 | 130 | mutation to lysine |
| | | | mutation to arginine |
| 477 | 464 | 147 | mutation to asparagine |
| | | | mutation to glutamine |
| 478 | 465 | 148 | mutation to lysine |
| | | | mutation to arginine |
| | | | mutation to histidine |
| 484 | 471 | 154 | mutation to alanine |
| | | | mutation to lysine |
| | | | mutation to arginine |
| | | | mutation to histidine |
| | | | mutation to glutamine |
| | | | mutation to asparagine |
| 486 | 473 | 156 | mutation to valine |
| | | | mutation to leucine |
| | | | mutation to isoleucine |
| | | | mutation to serine |
| | | | mutation to threonine |
| 490 | 477 | 160 | mutation to serine |
| | | | mutation to threonine |
| 493 | 480 | 163 | mutation to lysine |
| | | | mutation to arginine |
| | | | mutation to histidine |
| 494 | 481 | 164 | mutation to proline |
| 496 | 483 | 166 | mutation to serine |
| | | | mutation to threonine |
| 498 | 485 | 168 | mutation to lysine |
| | | | mutation to arginine |
| | | | mutation to histidine |
| 501 | 488 | 171 | mutation to tyrosine |
| | | | mutation to phenylalanine |
| | | | mutation to tryptophan |
| 505 | 492 | 175 | mutation to histidine |
| 521 | 508 | 191 | mutation to serine |
| | | | mutation to threonine |

*amino acids 331-527 of SEQ ID NO: 1 and amino acids 318-514 of SEQ ID NO: 2

### CoV S Polypeptide Antigens—Modifications to SD1/2

[0146] In embodiments, the CoV S polypeptides contain one or more modifications to the SD1/2 having an amino acid sequence of SEQ ID NO: 122, which corresponds to amino acids 542-681 of SEQ ID NO: 1 or amino acids 529-668 of SEQ ID NO: 2.

[0147] The amino acid sequence of the SD1/2 (SEQ ID NO: 122) is shown below.

NFNGLTGTGVLTESNKKFLPFQQFGRDIADTTDAVRDPQTLEILDITPCS
FGGVSVITPGTNTSNQVAVLYQDVNCTEVPVAIHADQLTPTWRVYSTGSN
VFQTRAGCLIGAEHVNNSYECDIPIGAGICASYQTQTNSP

[0148] In embodiments, the CoV S polypeptides described herein comprise a SD1/2 with at least 95%, at least 96%, at least 97%, at least 98%, at least 99%, or at least 99.5%, identity to the SD1/2 of SEQ ID NO: 1 or SEQ ID NO: 2. The SD1/2 may have a deletion, an insertion, or mutation of up to about 1, up to about 2, up to about 3, up to about 4, up to about 5, up to about 10, up to about 15, up to about 20, up to about 25, or up to about 30 amino acids compared to the amino acid sequence of the SD1/2 of SEQ ID NO: 1 or SEQ ID NO: 2. The SD1/2 may have a deletion, an insertion, or mutation of between about 1 and about 5 amino acids, between about 3 and about 10 amino acids, between about 5 and 10 amino acids, between about 8 and 12 amino acids, between about 10 and 15 amino acids, between about 12 and 17 amino acids, between about 15 and 20 amino acids, between about 18 and 23 amino acids, between about 20 and 25 amino acids, between about 22 and about 27 amino acids, or between about 25 and 30 amino acids as compared to the SD1/2 of SEQ ID NO: 1 or SEQ ID NO: 2.

[0149] In embodiments, the CoV S polypeptide has at least one, at least two, at least three, at least four, at least four, at least 5, at least 6, at least 7, at least 8, at least 9, at least 10, at least 11, at least 12, at least 13, at least 14, at least 15, at least 16, at least 17, at least 18, at least 19, or at least 20 mutations in the SD1/2. In embodiments, the SD1/2 may contain any combination of modifications as shown in Table 1D.

TABLE 1D
Modifications to SD1/2 (SEQ ID NO: 122)

| Position within | Position within | Position within | |
|---|---|---|---|
| SEQ ID NO: 1 | SEQ ID NO: 2 | SEQ ID NO: 122 | Potential Modifications |
| 547 | 534 | 6 | mutation to lysine |
| | | | mutation to arginine |
| | | | mutation to histidine |
| 570 | 557 | 29 | mutation to aspartic acid |
| | | | mutation to glutamic acid |
| 604 | 591 | 63 | mutation to isoleucine |
| | | | mutation to leucine |
| | | | mutation to valine |
| | | | mutation to beta-branched amino acid |
| 613 | 600 | 72 | mutation to histidine |
| | | | mutation to lysine |
| | | | mutation to arginine |
| 614 | 601 | 73 | mutation to glycine |
| | | | mutation to alanine |
| 639 | 626 | 98 | mutation to valine |
| | | | mutation to leucine |
| | | | mutation to isoleucine |
| 655 | 642 | 114 | mutation to tyrosine |
| | | | mutation to phenylalanine |
| | | | mutation to tryptophan |
| 658 | 645 | 117 | mutation to serine |
| 677 | 664 | 136 | mutation to histidine |
| 679 | 666 | 138 | mutation to lysine |
| | | | mutation to arginine |
| | | | mutation to histidine |
| 681 | 668 | 140 | mutation to histidine |
| | | | mutation to lysine |
| | | | mutation to arginine |
| 547 | 534 | 6 | mutation to lysine |
| | | | mutation to arginine |
| | | | mutation to histidine |
| 570 | 557 | 29 | mutation to aspartic acid |
| | | | mutation to glutamic acid |
| 613 | 600 | 72 | mutation to histidine |
| | | | mutation to lysine |
| | | | mutation to arginine |
| 614 | 601 | 73 | mutation to glycine |
| | | | mutation to alanine |
| 655 | 642 | 114 | mutation to tyrosine |
| | | | mutation to phenylalanine |
| | | | mutation to tryptophan |
| 677 | 664 | 136 | mutation to histidine |
| 679 | 666 | 138 | mutation to lysine |
| | | | mutation to arginine |
| | | | mutation to histidine |

*amino acids 542-681 of SEQ ID NO: 1 or amino acids 529-668 of SEQ ID NO: 2

### CoV S Polypeptide Antigens-Modifications to Furin Cleavage Site

[0150] In embodiments, the CoV S polypeptides contain a furin site (RRAR), which corresponds to amino acids 682-685 of SEQ ID NO: 1 or amino acids 669-672 of SEQ ID NO: 2, that is inactivated by one or more mutations. Inactivation of the furin cleavage site prevents furin from cleaving the CoV S polypeptide. In embodiments, the CoV S polypeptides described herein which contain an inactivated furin cleavage site are expressed as a single chain.

[0151] In embodiments, one or more of the amino acids comprising the native furin cleavage site is mutated to any natural amino acid. In embodiments, the amino acids are L-amino acids. Non-limiting examples of amino acids include alanine, arginine, glycine, asparagine, aspartic acid, cysteine, glutamine, glutamic acid, serine, threonine, histidine, lysine, methionine, proline, valine, isoleucine, leucine, tyrosine, tryptophan, and phenylalanine.

[0152] In embodiments, one or more of the amino acids comprising the native furin cleavage site is mutated to glutamine. In embodiments, 1, 2, 3, or 4 amino acids may be mutated to glutamine. In embodiments, one of the arginines comprising the native furin cleavage site is mutated to glutamine. In embodiments, two of the arginines comprising the native furin cleavage site are mutated to glutamine. In embodiments, three of the arginines comprising the native furin cleavage site are mutated to glutamine.

[0153] In embodiments, one or more of the amino acids comprising the native furin cleavage site, is mutated to alanine. In embodiments, 1, 2, 3, or 4 amino acids may be mutated to alanine. embodiments, one of the arginines comprising the native furin cleavage site is mutated to alanine. In embodiments, two of the arginines comprising the native furin cleavage site are mutated to alanine. In embodiments, three of the arginines comprising the native furin cleavage site are mutated to alanine.

[0154] In embodiments, one or more of the amino acids comprising the native furin cleavage site is mutated to glycine. In embodiments, 1, 2, 3, or 4 amino acids may be mutated to glycine. In embodiments, one of the arginines of the native furin cleavage site is mutated to glycine. In embodiments, two of the arginines comprising the native furin cleavage site are mutated to glycine. In embodiments, three of the arginines comprising the native furin cleavage site are mutated to glycine.

[0155] In embodiments, one or more of the amino acids comprising the native furin cleavage site, is mutated to asparagine. For example 1, 2, 3, or 4 amino acids may be mutated to asparagine. In embodiments, one of the arginines comprising the native furin cleavage site is mutated to asparagine. In embodiments, two of the arginines comprising the native furin cleavage site are mutated to asparagine. In embodiments, three of the arginines comprising the native furin cleavage site are mutated to asparagine.

[0156] Non-limiting examples of the amino acid sequences of the inactivated furin sites contained within the CoV S polypeptides are found in Table 1E.

TABLE 1E

| | Active or |
|---|---|
| | Inactive |
| | Furin |
| Amino Acid Sequence | Cleavage |
| of Furin Cleavage Site | Site |
| RRAR (SEQ ID NO: 6) | Active |
| QQAQ (SEQ ID NO: 7) | Inactive |
| QRAR (SEQ ID NO: 8) | Inactive |
| RQAR (SEQ ID NO: 9) | Inactive |
| RRAQ (SEQ ID NO: 10) | Inactive |
| QQAR (SEQ ID NO: 11) | Inactive |
| RQAQ (SEQ ID NO: 12) | Inactive |
| QRAQ (SEQ ID NO: 13) | Inactive |
| NNAN (SEQ ID NO: 14) | Inactive |
| NRAR (SEQ ID NO: 15) | Inactive |
| RNAR (SEQ ID NO: 16) | Inactive |
| RRAN (SEQ ID NO: 17) | Inactive |
| NNAR (SEQ ID NO: 18) | Inactive |
| RNAN (SEQ ID NO: 19) | Inactive |
| NRAN (SEQ ID NO: 20) | Inactive |
| AAAA (SEQ ID NO: 21) | Inactive |
| ARAR (SEQ ID NO: 22) | Inactive |
| RAAR (SEQ ID NO: 23) | Inactive |
| RRAA (SEQ ID NO: 24) | Inactive |
| AAAR (SEQ ID NO: 25) | Inactive |
| RAAA (SEQ ID NO: 26) | Inactive |
| ARAA (SEQ ID NO: 27) | Inactive |
| GGAG (SEQ ID NO: 28) | Inactive |
| GRAR (SEQ ID NO: 29) | Inactive |
| RGAR (SEQ ID NO: 30) | Inactive |
| RRAG (SEQ ID NO: 31) | Inactive |
| GGAR (SEQ ID NO: 32) | Inactive |
| RGAG (SEQ ID NO: 33) | Inactive |
| GRAG (SEQ ID NO: 34) | Inactive |
| GSAS (SEQ ID NO: 97) | Inactive |
| GSGA (SEQ ID NO: 111) | Inactive |

[0157] In embodiments, in lieu of an active furin cleavage site (SEQ ID NO: 6) the CoV S polypeptides described herein contain an inactivated furin cleavage site. In embodiments, the amino acid sequence of the inactivated furin cleavage site is represented by any one of SEQ ID NO: 7-34 or SEQ ID NO: 97. In embodiments, the amino acid sequence of the inactivated furin cleavage site is QQAQ (SEQ ID NO: 7). In embodiments, the amino acid sequence of the inactivated furin cleavage site is GSAS (SEQ ID NO: 97). In embodiments, the amino acid sequence of the inactivated furin cleavage site is GSGA (SEQ ID NO: 111). In embodiments, the amino acid sequence of the inactivated furin cleavage site is GG, GGG (SEQ ID NO: 127), GGGG (SEQ ID NO: 128), or GGGGG (SEQ ID NO: 129).

### CoV S Polypeptide Antigens-Modifications to S2 Subunit

[0158] In embodiments, the CoV S polypeptides contain one or more modifications to the S2 subunit having an amino acid sequence of SEQ ID NO: 120, which corresponds to amino acids 686-1273 of SEQ ID NO: 1 or amino acids 673-1260 of SEQ ID NO: 2.

[0159] The amino acid sequence of the S2 subunit (SEQ ID NO: 120) is shown below.

SVASQSIIAYTMSLGAENSVAYSNNSIAIPTNFTISVTTEILPVSMTKTS
VDCTMYICGDSTECSNLLLQYGSFCTQLNRALTGIAVEQDKNTQEVFAQV
KQIYKTPPIKDFGGFNFSQILPDPSKPSKRSFIEDLLFNKVTLADAGFIK
QYGDCLGDIAARDLICAQKFNGLTVLPPLLTDEMIAQYTSALLAGTITSG
WTFGAGAALQIPFAMQMAYRFNGIGVTQNVLYENQKLIANQFNSAIGKIQ
DSLSSTASALGKLQDVVNQNAQALNTLVKQLSSNFGAISSVLNDILSRLD
KVEAEVQIDRLITGRLQSLQTYVTQQLIRAAEIRASANLAATKMSECVLG
QSKRVDFCGKGYHLMSFPQSAPHGVVFLHVTYVPAQEKNFTTAPAICHDG
KAHFPREGVFVSNGTHWFVTQRNFYEPQIITTDNTFVSGNCDVVIGIVNN
TVYDPLQPELDSFKEELDKYFKNHTSPDVDLGDISGINASVVNIQKEIDR
LNEVAKNLNESLIDLQELGKYEQYIKWPWYIWLGFIAGLIAIVMVTIMLC
CMTSCCSCLKGCCSCGSCCKFDEDDSEPVLKGVKLHYT

[0160] In embodiments, the CoV S polypeptides described herein comprise an S2 subunit with at least 95%, at least 96%, at least 97%, at least 98%, at least 99%, or at least 99.5%, identity to the S2 subunit of SEQ ID NO: 1 or SEQ ID NO: 2. The S2 subunit may have a deletion, an insertion, or mutation of up to about 1, up to about 2, up to about 3, up to about 4, up to about 5, up to about 10, up to about 15, up to about 20, up to about 25, or up to about 30 amino acids compared to the amino acid sequence of the S2 subunit of SEQ ID NO: 1 or SEQ ID NO: 2. The S2 subunit may have a deletion, an insertion, or mutation of between about 1 and about 5 amino acids, between about 3 and about 10 amino acids, between about 5 and 10 amino acids, between about 8 and 12 amino acids, between about 10 and 15 amino acids, between about 12 and 17 amino acids, between about 15 and 20 amino acids, between about 18 and 23 amino acids, between about 20 and 25 amino acids, between about 22 and about 27 amino acids, or between about 25 and 30 amino acids as compared to the S2 subunit of SEQ ID NO: 1 or SEQ ID NO: 2.

[0161] In embodiments, the S2 subunit may contain any combination of modifications as shown in Table 1F.

TABLE 1F
Modifications to S2 (SEQ ID NO: 120)

| Position within | Position within | Position within | |
|---|---|---|---|
| SEQ ID NO: 1 | SEQ ID NO: 2 | SEQ ID NO: 120 | Possible Modifications |
| 689-698 | 676-685 | 4-13 | Deletion of up to about 1, up to about 2, up to |
| | | | about 3, up to about 4, up to about 5, up to about |
| | | | 6, up to about 7, up to about 8, up to about 9, or up |
| | | | to about 10 amino acids |
| 701 | 688 | 16 | Mutation to beta-branched amino acid |
| | | | Mutation to valine |
| | | | Mutation to isoleucine |
| | | | Mutation to threonine |
| 704 | 691 | 19 | Mutation to leucine |
| | | | Mutation to isoleucine |
| | | | Mutation to valine |
| 715-724 | 702-711 | 30-39 | Deletion of up to about 1, up to about 2, up to |
| | | | about 3, up to about 4, up to about 5, up to about |
| | | | 6, up to about 7, up to about 8, up to about 9, or up |
| | | | to about 10 amino acids |
| 716 | 703 | 31 | Mutation to beta-branched amino acid |
| | | | Mutation to valine |
| | | | Mutation to isoleucine |
| 764 | 751 | 79 | Mutation to lysine |
| | | | Mutation to arginine |
| | | | Mutation to histidine |
| 788-806 | 775-793 | 103-121 | Deletion of up to about 1, up to about 2, up to |
| | | | about 3, up to about 4, up to about 5, up to about |
| | | | 6, up to about 7, up to about 8, up to about 9, up to |
| | | | about 10, up to about 11, up to about 12, up to |
| | | | about 13, up to about 14, up to about 15, up to |
| | | | about 16, up to about 17, up to about 18, or up to |
| | | | about 19 amino acids |
| 796 | 783 | 111 | Mutation to tyrosine |
| | | | Mutation to phenylalanine |
| | | | Mutation to tryptophan |
| 819-828 | 806-815 | 134-143 | Deletion of up to about 1, up to about 2, up to |
| | | | about 3, up to about 4, up to about 5, up to about |
| | | | 6, up to about 7, up to about 8, up to about 9, or up |
| | | | to about 10 amino acids |
| 856 | 843 | 171 | Mutation to lysine |
| | | | Mutation to arginine |
| | | | Mutation to histidine |
| 859 | 846 | 174 | Mutation to asparagine |
| | | | Mutation to glutamine |
| 888 | 875 | 203 | Mutation to leucine |
| | | | Mutation to isoleucine |
| | | | Mutation to valine |
| 950 | 937 | 265 | Mutation to asparagine |
| | | | Mutation to glutamine |
| 954 | 941 | 269 | Mutation to histidine |
| | | | Mutation to lysine |
| | | | Mutation to arginine |
| 969 | 956 | 284 | Mutation to lysine |
| | | | Mutation to arginine |
| | | | Mutation to histidine |
| 981 | 968 | 296 | Mutation to phenylalanine |
| | | | Mutation to tyrosine |
| | | | Mutation to tryptophan |
| 982 | 969 | 297 | Mutation to alanine |
| | | | Mutation to glycine |
| | | | Mutation to threonine |
| 986 | 973 | 301 | Mutation to proline |
| | | | Mutation to glycine |
| 987 | 974 | 302 | Mutation to proline |
| | | | Mutation to glycine |
| 1027 | 1014 | 342 | Mutation to isoleucine |
| | | | Mutation to valine |
| | | | Mutation to serine |
| 1071 | 1058 | 386 | Mutation to histidine |
| | | | Mutation to arginine |
| | | | Mutation to lysine |
| 1118 | 1105 | 433 | Mutation to histidine |
| | | | Mutation to lysine |
| | | | Mutation to arginine |
| | | | Mutation to asparagine |
| | | | Mutation to glutamine |
| 1176 | 1163 | 491 | Mutation to phenylalanine |
| | | | Mutation to tyrosine |
| | | | Mutation to tryptophan |
| 1199 | 1186 | 514 | Mutation to asparagine |
| | | | Mutation to glutamine |
| 1214-1237 | 1201-1224 | 1-24 | Deletion of one or more amino acids of TM |
| 1238-1273 | 1225-1260 | 1-36 | Deletion of one or more amino acids of CD |

*amino acids 686-1273 of SEQ ID NO: 1 and amino acids 673-1260 of SEQ ID NO: 2

[0162] In embodiments, the CoV S polypeptides contain a deletion, corresponding to one or more deletions within amino acids 676-685 of the native CoV Spike(S) polypeptide (SEQ ID NO: 2). In embodiments, 1, 2, 3, 4, 5, 6, 7, 8, 9, or 10 amino acids of amino acids 676-685 of the native CoV Spike(S) polypeptide (SEQ ID NO:2) are deleted. In embodiments, the deletions of amino acids within amino acids 676-685 are consecutive e.g. amino acids 676 and 677 are deleted or amino acids 680 and 681 are deleted. In embodiments, the deletions of amino acids within amino acids 676-685 are non-consecutive e.g. amino acids 676 and 680 are deleted or amino acids 677 and 682 are deleted. In embodiments, CoV S polypeptides containing a deletion, corresponding to one or more deletions within amino acids 676-685, have an amino acid sequence selected from the group consisting of SEQ ID NO: 62 and SEQ ID NO: 63.

[0163] In embodiments, the CoV S polypeptides contain a deletion, corresponding to one or more deletions within amino acids 702-711 of the native CoV Spike(S) polypeptide (SEQ ID NO: 2). In embodiments, 1, 2, 3, 4, 5, 6, 7, 8, 9, or 10 amino acids of amino acids 702-711 of the native SARS-COV-2 Spike(S) polypeptide (SEQ ID NO:2) are deleted. In embodiments, the one or more deletions of amino acids within amino acids 702-711 are consecutive e.g. amino acids 702 and 703 are deleted or amino acids 708 and 709 are deleted. In embodiments, the deletions of amino acids within amino acids 702-711 are non-consecutive e.g. amino acids 702 and 704 are deleted or amino acids 707 and 710 are deleted. In embodiments, the CoV S polypeptides containing a deletion, corresponding to one or more deletions within amino acids 702-711, have an amino acid sequence selected from the group consisting of SEQ ID NO: 64 and SEQ ID NO: 65.

[0164] In embodiments, the CoV S polypeptides contain a deletion, corresponding to one or more deletions within amino acids 775-793 of the native CoV S polypeptide (SEQ ID NO: 2). In embodiments, up to about 1, 2, 3, 4, 5, 6, 7, 8, 9, 10, 11, 12, 13, 14, 15, 16, 17, 18, or 19 amino acids of amino acids 775-793 of the native SARS-COV-2 Spike(S) polypeptide (SEQ ID NO:2) are deleted. In embodiments, the one or more deletions of amino acids within amino acids 775-793 are consecutive e.g. amino acids 776 and 777 are deleted or amino acids 780 and 781 are deleted. In embodiments, the deletions of amino acids within amino acids 775-793 are non-consecutive e.g. amino acids 775 and 790 are deleted or amino acids 777 and 781 are deleted.

[0165] In embodiments, the CoV S polypeptides contain a deletion of the fusion peptide (SEQ ID NO: 104), which corresponds to amino acids 806-815 of SEQ ID NO: 2. In embodiments, 1, 2, 3, 4, 5, 6, 7, 8, 9, or 10 amino acids of the fusion peptide of the CoV Spike(S) polypeptide (SEQ ID NO: 2) are deleted. In embodiments, the deletions of amino acids within the fusion peptide arc consecutive e.g. amino acids 806 and 807 are deleted or amino acids 809 and 810 are deleted. In embodiments, the deletions of amino acids within the fusion peptide are non-consecutive e.g. amino acids 806 and 808 are deleted or amino acids 810 and 813 are deleted. In embodiments, the CoV S polypeptides containing a deletion, corresponding to one or more amino acids of the fusion peptide, have an amino acid sequence selected from SEQ ID NOS: 66, 77, and 105-108.

[0166] In embodiments, the CoV S polypeptides contain a mutation at Lys-973 of the native CoV Spike(S) polypeptide (SEQ ID NO: 2). In embodiments, Lys-973 is mutated to any natural amino acid. In embodiments, Lys-973 is mutated to proline. In embodiments, Lys-973 is mutated to glycine. In embodiments, the CoV S polypeptides containing a mutation at amino acid 973 are selected from the group consisting of SEQ ID NO: 84-89, 105-106, and 109-110.

[0167] In embodiments, the CoV S polypeptides contain a mutation at Val-974 of the native CoV Spike(S) polypeptide (SEQ ID NO: 2). In embodiments, Val-974 is mutated to any natural amino acid. In embodiments, Val-974 is mutated to proline. In embodiments, Val-974 is mutated to glycine. In embodiments, the CoV S polypeptides containing a mutation at amino acid 974 arc selected from the group consisting of SEQ ID NO: 84-89, 105-106, and 109-110.

[0168] In embodiments, the CoV S polypeptides contain a mutation at Lys-973 and Val-974 of the native CoV Spike(S) polypeptide (SEQ ID NO: 2). In embodiments, Lys-973 and Val-974 arc mutated to any natural amino acid. In embodiments, Lys-973 and Val-974 are mutated to proline. In embodiments, the CoV S polypeptides containing a mutation at amino acids 973 and 974 are selected from SEQ ID NOS: 84-89, 105-106, 109-110, 175, 220, and 217-228.

[0169] CoV S Polypeptide Antigens-Modifications to S2 subunit-HR1 Domain

[0170] In embodiments, the CoV S polypeptides contain one or more modifications to the HR1 domain having an amino acid sequence of SEQ ID NO: 119, which corresponds to amino acids 912-984 of SEQ ID NO: 1 or amino acids 889-971 of SEQ ID NO: 2.

[0171] The amino acid sequence of the HR1 domain (SEQ ID NO: 119) is shown below.

MAYRFNGIGVTQNVLYENQKLIANQFNSAIGKIQDSLSSTASALGKLQDV
VNQNAQALNTLVKQLSSNFGAISSVLNDILSRL

[0172] In embodiments, the CoV S polypeptides described herein comprise an HR1 domain with at least 95%, at least 96%, at least 97%, at least 98%, at least 99%, or at least 99.5%, identity to the HR1 domain of SEQ ID NO: 1 or SEQ ID NO: 2. The HR1 domain may have a deletion, an insertion, or mutation of up to about 1, up to about 2, up to about 3, up to about 4, up to about 5, up to about 10, up to about 15, up to about 20, up to about 25, or up to about 30 amino acids compared to the amino acid sequence of the HR1 domain of SEQ ID NO: 1 or SEQ ID NO: 2. The HR1 domain may have a deletion, an insertion, or mutation of between about 1 and about 5 amino acids, between about 3 and about 10 amino acids, between about 5 and 10 amino acids, between about 8 and 12 amino acids, between about 10 and 15 amino acids, between about 12 and 17 amino acids, between about 15 and 20 amino acids, between about 18 and 23 amino acids, between about 20 and 25 amino acids, between about 22 and about 27 amino acids, or between about 25 and 30 amino acids as compared to the HR1 domain of SEQ ID NO: 1 or SEQ ID NO: 2.

[0173] In embodiments, the HR1 domain may contain any combination of modifications as shown in Table 1G.

TABLE 1G
Modifications to HR1 (SEQ ID NO: 119)

| Position | Position | Position | |
|---|---|---|---|
| within | within | within | |
| SEQ ID | SEQ ID | SEQ ID | |
| NO: 1 | NO: 2 | NO: 119 | Possible Modifications |
| 950 | 937 | 49 | Mutation to asparagine |
| | | | Mutation to glutamine |
| 954 | 941 | 53 | Mutation to histidine |
| 969 | 956 | 68 | Mutation to lysine |
| | | | Mutation to arginine |
| | | | Mutation to histidine |
| 981 | 968 | 80 | Mutation to phenylalanine |
| | | | Mutation to tyrosine |
| | | | Mutation to tryptophan |
| 982 | 969 | 81 | Mutation to alanine |
| | | | Mutation to glycine |
| | | | Mutation to threonine |

* amino acids 912-984 of SEQ ID NO: 1 and amino acids 889-971 of SEQ ID NO: 2)

### CoV S Polypeptide Antigens-Modifications to S2 Subunit-HR2 Domain

[0174] In embodiments, the CoV S polypeptides contain one or more modifications to the HR2 domain having an amino acid sequence of SEQ ID NO: 125, which corresponds to amino acids 1163-1213 of SEQ ID NO: 1 or amino acids 1150-1200 of SEQ ID NO: 2.

[0175] The amino acid sequence of the HR2 domain (SEQ ID NO: 125) is shown below.
[0176] DVDLGDISGINASVVNIQKEIDRLNEVAKNLNESLIDLQELGKYEQYIKWP

[0177] In embodiments, the CoV S polypeptides described herein comprise an HR2 domain with at least 95%, at least 96%, at least 97%, at least 98%, at least 99%, or at least 99.5%, identity to the HR2 domain of SEQ ID NO: 1 or SEQ ID NO: 2. The HR2 domain may have a deletion, an insertion, or mutation of up to about 1, up to about 2, up to about 3, up to about 4, up to about 5, up to about 10, up to about 15, up to about 20, up to about 25, or up to about 30 amino acids compared to the amino acid sequence of the HR2 domain of SEQ ID NO: 1 or SEQ ID NO: 2. The HR2 domain may have a deletion, an insertion, or mutation of between about 1 and about 5 amino acids, between about 3 and about 10 amino acids, between about 5 and 10 amino acids, between about 8 and 12 amino acids, between about 10 and 15 amino acids, between about 12 and 17 amino acids, between about 15 and 20 amino acids, between about 18 and 23 amino acids, between about 20 and 25 amino acids, between about 22 and about 27 amino acids, or between about 25 and 30 amino acids as compared to the HR2 domain of SEQ ID NO: 1 or SEQ ID NO: 2.

[0178] CoV S Polypeptide Antigens-Modifications to the TM domain

[0179] In embodiments, the CoV S polypeptides contain one or more modifications to the TM domain having an amino acid sequence of SEQ ID NO: 123, which corresponds to amino acids 1214-1237 of SEQ ID NO: 1 or amino acids 1201-1224 of SEQ ID NO: 2.

[0180] The amino acid sequence of the TM domain (SEQ ID NO: 123) is shown below.

WYIWLGFIAGLIAIVMVTIMLCCM

[0181] In embodiments, the CoV S polypeptides described herein comprise a TM domain with at least 95%, at least 96%, at least 97%, at least 98%, at least 99%, or at least 99.5%, identity to the TM domain of SEQ ID NO: 1 or SEQ ID NO: 2. The TM domain may have a deletion, an insertion, or mutation of up to about 1, up to about 2, up to about 3, up to about 4, up to about 5, up to about 10, up to about 15, up to about 20, up to about 25, or up to about 30 amino acids compared to the amino acid sequence of the TM domain of SEQ ID NO: 1 or SEQ ID NO: 2. The TM domain may have a deletion, an insertion, or mutation of between about 1 and about 5 amino acids, between about 3 and about 10 amino acids, between about 5 and 10 amino acids, between about 8 and 12 amino acids, between about 10 and 15 amino acids, between about 12 and 17 amino acids, between about 15 and 20 amino acids, between about 18 and 23 amino acids, between about 20 and 25 amino acids, between about 22 and about 27 amino acids, or between about 25 and 30 amino acids as compared to the TM domain of SEQ ID NO: 1 or SEQ ID NO: 2.

[0182] In embodiments, the CoV S polypeptides described herein lack the entire TM domain. In embodiments, the CoV S polypeptides comprise the TM domain.

### CoV S Polypeptide Antigens-Modifications to the CT

[0183] In embodiments, the CoV S polypeptides contain one or more modifications to the CT having an amino acid sequence of SEQ ID NO: 124, which corresponds to amino acids 1238-1273 of SEQ ID NO: 1 or amino acids 1225-1260 of SEQ ID NO: 2.

[0184] The amino acid sequence of the CT (SEQ ID NO: 124) is shown below:

TSCCSCLKGCCSCGSCCKFDEDDSEPVLKGVKLHYT

[0185] In embodiments, the CoV S polypeptides described herein comprise a CT with at least 95%, at least 96%, at least 97%, at least 98%, at least 99%, or at least 99.5%, identity to the CT of SEQ ID NO: 1 or SEQ ID NO: 2. The CT may have a deletion, an insertion, or mutation of up to about 1, up to about 2, up to about 3, up to about 4, up to about 5, up to about 10, up to about 15, up to about 20, up to about 25, or up to about 30 amino acids compared to the amino acid sequence of the CT of SEQ ID NO: 1 or SEQ ID NO: 2. The CT may have a deletion, an insertion, or mutation of between about 1 and about 5 amino acids, between about 3 and about 10 amino acids, between about 5 and 10 amino acids, between about 8 and 12 amino acids, between about 10 and 15 amino acids, between about 12 and 17 amino acids, between about 15 and 20 amino acids, between about 18 and 23 amino acids, between about 20 and 25 amino acids, between about 22 and about 27 amino acids, or between about 25 and 30 amino acids as compared to the CT of SEQ ID NO: 1 or SEQ ID NO: 2.

[0186] In embodiments, the CoV S polypeptides described herein lack a CT. In embodiments, the CoV S polypeptides comprise the CT.

[0187] In embodiments, the CoV S polypeptides comprise a TM and a CT. In embodiments, the CoV Spike(S) polypeptides contain a deletion of one or more amino acids from the transmembrane and cytoplasmic tail (TMCT) (corresponding to amino acids 1201-1260). The amino acid sequence of the TMCT is represented by SEQ ID NO: 39. In embodiments, the CoV S polypeptides which have a deletion of one or more residues of the TMCT have enhanced protein expression. In embodiments, the CoV Spike(S) polypeptides which have one or more deletions from the TMCT have an amino acid sequence selected from the group consisting of SEQ ID NO: 40, 41, 42, 52, 54, 59, 61, 88, and 89. In embodiments, the CoV S polypeptides which have one or more deletions from the TM-CD are encoded by an isolated nucleic acid sequence selected from the group consisting of SEQ ID NO: 39, 43, 53, and 60.

### CoV S Polypeptide Antigens-Non-Limiting Combinations of Mutations

[0188] In embodiments, the CoV S polypeptides contain a deletion of amino acids 56 and 57 of the native CoV Spike(S) polypeptide (SEQ ID NO: 2).

[0189] In embodiments, the CoV S polypeptides contain deletions of amino acids 131 and 132 of the native CoV Spike(S) polypeptide (SEQ ID NO: 2).

[0190] In embodiments, the CoV S polypeptides contain a deletion of amino acids 56 and 131 of the native CoV Spike(S) polypeptide (SEQ ID NO: 2). In embodiments, the CoV S polypeptides contain a deletion of amino acids 57 and 131 of the native CoV Spike(S) polypeptide (SEQ ID NO: 2).

[0191] In embodiments, the CoV S polypeptides contain a deletion of amino acids 56, 57, and 131 of the native CoV Spike(S) polypeptide (SEQ ID NO: 2).

[0192] In embodiments, the CoV S polypeptides contain a deletion of amino acids 56 and 132 of the native CoV Spike(S) polypeptide (SEQ ID NO: 2).

[0193] In embodiments, the CoV S polypeptides contain a deletion of amino acids 57 and 132 of the native CoV Spike(S) polypeptide (SEQ ID NO: 2).

[0194] In embodiments, the CoV S polypeptides contain a deletion of amino acids 56, 57, and 132 of the native CoV Spike(S) polypeptide (SEQ ID NO: 2).

[0195] In embodiments, the CoV S polypeptides contain a deletion of amino acids 56, 57, 131, and 132 of the native CoV Spike(S) polypeptide (SEQ ID NO: 2).

[0196] In embodiments, the CoV S polypeptides contain mutations that stabilize the prefusion conformation of the CoV S polypeptide. In embodiments, the CoV S polypeptides contain proline or glycine substitutions which stabilize the prefusion conformation. This strategy has been utilized for to develop a prefusion stabilized MERS-COV S protein as described in the following documents which are each incorporated by reference herein in their entirety: Proc Natl Acad Sci USA. 2017 Aug. 29; 114 (35): E7348-E7357; Sci Rep. 2018 Oct. 24; 8 (1): 15701; U.S. Publication No. 2020/0061185; and PCT Application No. PCT/US2017/058370.

[0197] In embodiments, the CoV S polypeptides contain a mutation at Lys-973 and Val-974 and an inactivated furin cleavage site. In embodiments, the CoV S polypeptides contain mutations of Lys-973 and Val-974 to proline and an inactivated furin cleavage site, having the amino acid sequence of QQAQ (SEQ ID NO: 7) or GSAS (SEQ ID NO: 96). In embodiments, the CoV S polypeptides containing mutations of Lys-973 and Val-974 to proline and an inactivated furin cleavage site have an amino acid sequences of SEQ ID NOS: 86 or 87 and a nucleic acid sequence of SEQ ID NO: 96.

[0198] In embodiments, the CoV S polypeptides contain a mutation at Lys-973 and Val-974, an inactivated furin cleavage site, and a deletion of one or more amino acids of the fusion peptide. In embodiments, the CoV S polypeptides contain mutations of Lys-973 and Val-974 to proline, an inactivated furin cleavage site having the amino acid sequence of QQAQ (SEQ ID NO: 7) or GSAS (SEQ ID NO: 96), and deletion of one or more amino acids of the fusion peptide. In embodiments, the CoV S polypeptides containing mutations of Lys-973 and Val-974 to proline, an inactivated furin cleavage site, and deletion of one or more amino acids of the fusion peptide having an amino acid sequence of SEQ ID NO: 105 or 106. In embodiments, the CoV S polypeptide contains a mutation of Leu-5 to phenylalanine, mutation of Thr-7 to asparagine, mutation of Pro-13 to serine, mutation of Asp-125 to tyrosine, mutation of Arg-177 to serine, mutation of Lys-404 to threonine, mutation of Glu-471 to lysine, mutation of Asn-488 to tyrosine, mutation of His-642 to tyrosine, mutation of Thr-1014 to isoleucine, mutations of Lys-973 and Val-974 to proline, and an inactivated furin cleavage site having the amino acid sequence of QQAQ (SEQ ID NO: 7) or GSAS (SEQ ID NO: 96) relative to the native CoV Spike(S) polypeptide (SEQ ID NO: 2).

[0199] In embodiments, the CoV S polypeptide contains a mutation of Trp-139 to cysteine, mutation of Leu-439 to arginine, mutations of Lys-973 and Val-974 to proline, and an inactivated furin cleavage site having the amino acid sequence of QQAQ (SEQ ID NO: 7) or GSAS (SEQ ID NO: 96) relative to the native CoV Spike(S) polypeptide (SEQ ID NO: 2). In embodiments, the CoV S polypeptide contains a mutation of Trp-152 to cysteine, mutation of Leu-452 to arginine, mutation of Ser-13 to isoleucine, mutations of Lys-986 and Val-987 to proline, and an inactivated furin cleavage site having the amino acid sequence of QQAQ (SEQ ID NO: 7) or GSAS (SEQ ID NO: 96) relative to the native CoV Spike(S) polypeptide (SEQ ID NO: 1).

[0200] In embodiments, the CoV S polypeptide contains a mutation of Lys-404 to threonine or asparagine, mutation of Glu-471 to lysine, mutation of Asn-488 to tyrosine, mutation of Leu-5 to phenylalanine, mutation of Asp-67 to alanine, mutation of Asp-202 to glycine, deletion of one or more of amino acids 229-231, mutation of Arg-233 to isoleucine, mutations of Lys-973 and Val-974 to proline, and an inactivated furin cleavage site having the amino acid sequence of QQAQ (SEQ ID NO: 7) or GSAS (SEQ ID NO: 96) relative to the native CoV Spike(S) polypeptide (SEQ ID NO: 2).

[0201] In embodiments, the CoV S polypeptide contains a mutation of Asn-488 to tyrosine, mutations of Lys-973 and Val-974 to proline, and an inactivated furin cleavage site having the amino acid sequence of QQAQ (SEQ ID NO: 7) or GSAS (SEQ ID NO: 96) relative to the native CoV Spike(S) polypeptide (SEQ ID NO: 2). In embodiments, the CoV S polypeptide having a mutation of Asn-488 to tyrosine, mutations of Lys-973 and Val-974 to proline, and an inactivated furin cleavage site having the amino acid sequence of QQAQ (SEQ ID NO: 7) or GSAS (SEQ ID NO: 96) comprises an amino acid sequence of SEQ ID NO: 112.

[0202] In embodiments, the CoV S polypeptide contains a mutation of Asp-601 to glycine, a mutation of Asn-488 to tyrosine, mutations of Lys-973 and Val-974 to proline, and an inactivated furin cleavage site having the amino acid sequence of QQAQ (SEQ ID NO: 7) or GSAS (SEQ ID NO: 96) relative to the native CoV Spike(S) polypeptide (SEQ ID NO: 2). In embodiments, the CoV S polypeptide having a mutation of Asn-488 to tyrosine, mutations of Lys-973 and Val-974 to proline, and an inactivated furin cleavage site having the amino acid sequence of QQAQ (SEQ ID NO: 7) or GSAS (SEQ ID NO: 96) comprises an amino acid sequence of SEQ ID NO: 113.

[0203] In embodiments, the CoV S polypeptide contains deletion of amino acids 56, 57, and 131, mutation of Asn-488 to tyrosine, a mutation of Ala-557 to aspartate, mutation of Asp-601 to glycine, mutation of Pro-668 to histidine, mutation of Thr-703 to isoleucine, mutation of Ser-969 to alanine, mutation of Asp-1105 to histidine, mutations of Lys-973 and Val-974 to proline, and an inactivated furin cleavage site having the amino acid sequence of QQAQ (SEQ ID NO: 7), GSAS (SEQ ID NO: 96), or GG relative to the native CoV Spike(S) polypeptide (SEQ ID NO: 2). In embodiments, the CoV S polypeptide having deletion of amino acids 56, 57, and 131, mutation of Asn-488 to tyrosine, a mutation of Ala-557 to aspartate, mutation of Asp-601 to glycine, mutation of Pro-668 to histidine, mutation of Thr-703 to isoleucine, mutation of Ser-969 to alanine, mutation of Asp-1105 to histidine, mutations of Lys-973 and Val-974 to proline, and an inactivated furin cleavage site having the amino acid sequence of QQAQ (SEQ ID NO: 7) or GSAS (SEQ ID NO: 96) comprises an amino acid sequence of SEQ ID NO: 114. In embodiments, the CoV S polypeptide having deletion of amino acids 56, 57, and 131, mutation of Asn-488 to tyrosine, a mutation of Ala-557 to aspartate, mutation of Asp-601 to glycine, mutation of Pro-668 to histidine, mutation of Thr-703 to isoleucine, mutation of Ser-969 to alanine, mutation of Asp-1105 to histidine, mutations of Lys-973 and Val-974 to proline, and an inactivated furin cleavage site having the amino acid sequence of QQAQ (SEQ ID NO: 7) or GSAS (SEQ ID NO: 96) or GG comprises an amino acid sequence of SEQ ID NO: 136. In embodiments, the CoV S polypeptide having deletion of amino acids 56, 57, and 131, mutation of Asn-488 to tyrosine, a mutation of Ala-557 to aspartate, mutation of Asp-601 to glycine, mutation of Pro-668 to histidine, mutation of Thr-703 to isoleucine, mutation of Ser-969 to alanine, mutation of Asp-1105 to histidine, mutations of Lys-973 and Val-974 to proline, and an inactivated furin cleavage site having the amino acid sequence of GG comprises an amino acid sequence of SEQ ID NO: 137 or SEQ ID NO: 138. In some embodiments, the CoV S polypeptide having an amino acid sequence of SEQ ID NO: 114 or SEQ ID NO: 136 is encoded by a nucleic acid having a nucleic acid sequence of SEQ ID NO: 135. In some embodiments, the CoV S polypeptide having an amino acid sequence of SEQ ID NO: 137 or SEQ ID NO: 138 is encoded by a nucleic acid having a sequence of SEQ ID NO: 139.

[0204] In embodiments, the CoV S polypeptide contains deletion of amino acids 56, 57, and 132, mutation of Asn-488 to tyrosine, a mutation of Ala-557 to aspartate, mutation of Asp-601 to glycine, mutation of Pro-668 to histidine, mutation of Thr-703 to isoleucine, mutation of Ser-969 to alanine, mutation of Asp-1105 to histidine, mutations of Lys-973 and Val-974 to proline, and an inactivated furin cleavage site having the amino acid sequence of QQAQ (SEQ ID NO: 7) or GSAS (SEQ ID NO: 96 relative to the native CoV Spike(S) polypeptide (SEQ ID NO: 2). In embodiments, the CoV S polypeptide having a deletion of amino acids 56, 57, and 132, mutation of Asn-488 to tyrosine, a mutation of Ala-557 to aspartate, mutation of Asp-601 to glycine, mutation of Pro-668 to histidine, mutation of Thr-703 to isoleucine, mutation of Ser-969 to alanine, mutation of Asp-1105 to histidine, mutations of Lys-973 and Val-974 to proline, and an inactivated furin cleavage site having the amino acid sequence of QQAQ (SEQ ID NO: 7) or GSAS (SEQ ID NO: 96) comprises an amino acid sequence of SEQ ID NO: 114.

[0205] In embodiments, the CoV S polypeptide contains mutation of Asn-488 to tyrosine, mutation of Asp-67 to alanine, mutation of Leu-229 to histidine, mutation of Asp-202 to glycine, mutation of Lys-404 to asparagine, mutation of Glu-471 to lysine, mutation of Ala-688 to valine, mutation of Asp-601 to glycine, mutations of Lys-973 and Val-974 to proline, and an inactivated furin cleavage site having the amino acid sequence of QQAQ (SEQ ID NO: 7) or GSAS (SEQ ID NO: 96) relative to the native CoV Spike(S) polypeptide (SEQ ID NO: 2). In embodiments, the CoV S polypeptide having a mutation of Asn-488 to tyrosine, mutation of Asp-67 to alanine, mutation of Leu-229 to histidine, mutation of Asp-202 to glycine, mutation of Lys-404 to asparagine, mutation of Glu-471 to lysine, mutation of Ala-688 to valine, mutation of Asp-601 to glycine, mutations of Lys-973 and Val-974 to proline, and an inactivated furin cleavage site having the amino acid sequence of QQAQ (SEQ ID NO: 7) or GSAS (SEQ ID NO: 96) comprises an amino acid sequence of SEQ ID NO: 115.

[0206] In embodiments, the CoV S polypeptide contains one or more modifications selected from: K973P, V974P, an inactivated furin cleavage site, deletions of amino acid 56, deletion of amino acid 57, deletion of amino acid 131, N488Y, A557D, D601G, P668H, T7031, S969A, and D1105H, wherein the amino acids are numbered with respect to a CoV S polypeptide having an amino acid sequence of SEQ ID NO: 2. In embodiments, the inactivated furin cleavage site has the amino acid sequence of QQAQ (SEQ ID NO: 7). In embodiments, the inactivated furin cleavage site has the amino acid sequence of GG.

[0207] In embodiments, the CoV S polypeptide contains one or more modifications selected from: K973P, V974P, an inactivated furin cleavage site, D67A, D202G, L229H, K404N, E471K, N488Y, D601G, and A688V, wherein the amino acids are numbered with respect to a CoV S polypeptide having an amino acid sequence of SEQ ID NO: 2. In embodiments, the inactivated furin cleavage site has the amino acid sequence of QQAQ (SEQ ID NO: 7). In embodiments, the inactivated furin cleavage site has the amino acid sequence of GG.

[0208] In embodiments, the CoV S polypeptide contains one or more modifications selected from: K973P, V974P, an inactivated furin cleavage site, deletion of amino acids 229-231, D67A, D202G, K404N, E471K, N488Y, D601G, and A688V, wherein the amino acids are numbered with respect to a CoV S polypeptide having an amino acid sequence of SEQ ID NO: 2.

[0209] In embodiments, the CoV S polypeptide contains one or more modifications selected from: K973P, V974P, an inactivated furin cleavage site having the amino acid sequence of QQAQ (SEQ ID NO: 7), deletion of amino acids 229-231, L5F, D67A, D202G, K404N, E471K, N488Y, D601G, and A688V, wherein the amino acids are numbered with respect to a CoV S polypeptide having an amino acid sequence of SEQ ID NO: 2. In embodiments, the CoV S polypeptide having one or more modifications selected from K973P, V974P, an inactivated furin cleavage site having the amino acid sequence of QQAQ (SEQ ID NO: 7), deletion of amino acids 229-231, L5F, D67A, D202G, K404N, E471K, N488Y, D601G, and A688V, wherein the amino acids are numbered with respect to a CoV S polypeptide having an amino acid sequence of SEQ ID NO: 2 comprises the amino acid sequence of SEQ ID NO: 144. In embodiments, the CoV S polypeptide having the amino acid sequence of SEQ ID NO: 144 is encoded by a nucleic acid having a sequence of SEQ ID NO: 145.

[0210] In embodiments, the CoV S polypeptide contains one or more modifications selected from: K973P, V974P, an inactivated furin cleavage site having the amino acid sequence of GG, deletion of amino acids 229-231, L5F, D67A, D202G, K404N, E471K, N488Y, D601G, and A688V, wherein the amino acids are numbered with respect to a CoV S polypeptide having an amino acid sequence of SEQ ID NO: 2. In embodiments, the CoV S polypeptide having one or more modifications selected from K973P, V974P, an inactivated furin cleavage site having the amino acid sequence of GG, deletion of amino acids 229-231, L5F, D67A, D202G, K404N, E471K, N488Y, D601G, and A688V, wherein the amino acids are numbered with respect to a CoV S polypeptide having an amino acid sequence of SEQ ID NO: 2 comprises the amino acid sequence of SEQ ID NO: 144. In embodiments, the CoV S polypeptide having the amino acid sequence of SEQ ID NO: 144 is encoded by a nucleic acid having a sequence of SEQ ID NO: 145.

[0211] In embodiments, the CoV S polypeptide contains one or more modifications selected from: K973P, V974P, an inactivated furin cleavage site, L5F, T7N, P13S, D125Y, R177S, K404T, E471K, N488Y, D601G, H642Y, T1014I, and V1163F, wherein the amino acids are numbered with respect to a CoV S polypeptide having an amino acid sequence of SEQ ID NO: 2. In embodiments, the CoV S polypeptide containing one or more modifications selected from: K973P, V974P, an inactivated furin cleavage site, L5F, T7N, P13S, D125Y, R177S, K404T, E471K, N488Y, D601G, H642Y, T1014I, and V1163F, wherein the amino acids are numbered with respect to a CoV S polypeptide having an amino acid sequence of SEQ ID NO: 2, has an amino acid sequence of SEQ ID NO: 151. In embodiments, the CoV S polypeptide having an amino acid sequence of SEQ ID NO: 151 is encoded by a nucleic acid having a sequence of SEQ ID NO: 150.

[0212] In embodiments, the CoV S polypeptide contains one or more modifications selected from: K973P, V974P, an inactivated furin cleavage site, deletion of amino acids 229-231, L5F, D67A, D202G, L229H, K404N, E471K, N488Y, D601G, and A688V, wherein the amino acids are numbered with respect to a CoV S polypeptide having an amino acid sequence of SEQ ID NO: 2.

[0213] In embodiments, the CoV S polypeptide contains one or more modifications selected from: K973P, V974P, an inactivated furin cleavage site, K404N, E471K, N488Y, L5F, D67A, D202G, L229H, D601G, A688V, and deletion of amino acids 229-231, wherein the amino acids are numbered with respect to a CoV S polypeptide having an amino acid sequence of SEQ ID NO: 2. In embodiments, the inactivated furin cleavage site has the amino acid sequence of QQAQ (SEQ ID NO: 7). In embodiments, the inactivated furin cleavage site has the amino acid sequence of GG.

[0214] In embodiments, the CoV S polypeptide contains one or more modifications selected from: K973P, V974P, an inactivated furin cleavage site, K404N, E471K, and N488K wherein the amino acids are numbered with respect to a CoV S polypeptide having an amino acid sequence of SEQ ID NO: 2. In embodiments, the CoV S polypeptide contains one or more modifications selected from: K973P, V974P, an inactivated furin cleavage site, K404N, E471K, and N488Y. In embodiments, the CoV S polypeptide is the RBD of the CoV S polypeptide having one or more modifications selected from K973P, V974P, an inactivated furin cleavage site, K404N, E471K, and N488K wherein the amino acids are numbered with respect to a CoV S polypeptide having an amino acid sequence of SEQ ID NO: 2. In embodiments, the CoV S polypeptide is the RBD of the CoV S polypeptide having one or more modifications selected from K973P, V974P, an inactivated furin cleavage site, K404N, E471K, and N488Y wherein the amino acids are numbered with respect to a CoV S polypeptide having an amino acid sequence of SEQ ID NO: 2.

[0215] In embodiments, the CoV S polypeptide contains one or more modifications selected from: K973P, V974P, an inactivated furin cleavage site having the amino acid sequence of GG, D601G, E404N, E471K, and N488Y. In embodiments, the CoV S polypeptide contains one or more modifications selected from: K973P, V974P, an inactivated furin cleavage site having the amino acid sequence of GG, and a D601G mutation, wherein the amino acids are numbered with respect to a CoV S polypeptide having an amino acid sequence of SEQ ID NO: 2. In embodiments, the CoV S polypeptide containing modifications selected from: K973P, V974P, an inactivated furin cleavage site having the amino acid sequence of GG, and a D601G mutation has an amino acid sequence of SEQ ID NO: 133.

[0216] In embodiments, the CoV S polypeptide contains one or more modifications selected from: K973P, V974P, an inactivated furin cleavage site, optionally wherein the inactivated furin cleavage site is QQAQ (SEQ ID NO: 7) or GG, K404N, E471K, N488K, D67A, D202G, L229H, D601G, and A688V, wherein the amino acids are numbered with respect to a CoV S polypeptide having an amino acid sequence of SEQ ID NO: 2. In embodiments, the CoV S polypeptide containing one or more modifications selected from: K973P, V974P, an inactivated furin cleavage site, optionally wherein the inactivated furin cleavage site is QQAQ (SEQ ID NO: 7) or GG, K404N, E471K, N488K, D67A, D202G, L229H, D601G, and A688V has an amino acid sequence of SEQ ID NO: 132 or SEQ ID NO: 141. In embodiments, the CoV S polypeptide having an amino acid sequence of SEQ ID NO: 132 is encoded by a nucleic acid having a nucleic acid sequence of SEQ ID NO: 131. In embodiments, the CoV S polypeptide having an amino acid sequence of SEQ ID NO: 132 is encoded by a nucleic acid having a nucleic acid sequence of SEQ ID NO: 142.

[0217] In embodiments, the CoV S polypeptide contains one or more modifications selected from: K973P, V974P, an inactivated furin cleavage site, W139C and L439R, wherein the amino acids are numbered with respect to a CoV S polypeptide having an amino acid sequence of SEQ ID NO: 2. In embodiments, the CoV S polypeptide comprising K973P, V974P, an inactivated furin cleavage site, W139C and L439R modifications is expressed with a signal peptide having an amino acid sequence of SEQ ID NO: 117 or SEQ ID NO: 5. In embodiments, the CoV S polypeptide comprises one or more modifications selected from: K973P, V974P, an inactivated furin cleavage site, D601G, W139C, and L439R, wherein the amino acids are numbered with respect to a CoV S polypeptide having an amino acid sequence of SEQ ID NO: 2. In embodiments, the CoV S polypeptide comprises K973P, V974P, an inactivated furin cleavage site, D601G, W139C, and L439R modifications and is expressed with a signal peptide having an amino acid sequence of SEQ ID NO: 117 or SEQ ID NO: 5.

[0218] In embodiments, the CoV S polypeptide comprises one or more modifications selected from: K973P, V974P, an inactivated furin cleavage site, D601G, L5F, D67A, D202G, deletions of amino acids 229-231, R233I, K404N, E471K, N488Y, and A688V, wherein the amino acids are numbered with respect to a CoV S polypeptide having an amino acid sequence of SEQ ID NO: 2.

[0219] In embodiments, the CoV S polypeptide contains one or more modifications selected from: K973P, V974P, an inactivated furin cleavage site, optionally wherein the inactivated furin cleavage site is QQAQ (SEQ ID NO: 7), W139C, S481P, D601G, and L439R, wherein the amino acids are numbered with respect to a CoV S polypeptide having an amino acid sequence of SEQ ID NO: 2. In embodiments, the CoV S polypeptide contains one or more modifications selected from: K973P, V974P, an inactivated furin cleavage site, optionally wherein the inactivated furin cleavage site is QQAQ (SEQ ID NO: 7), W139C, D601G, and L439R, wherein the amino acids are numbered with respect to a CoV S polypeptide having an amino acid sequence of SEQ ID NO: 2. In embodiments, the CoV S polypeptide contains one or more modifications selected from: K973P, V974P, an inactivated furin cleavage site, optionally wherein the inactivated furin cleavage site is QQAQ (SEQ ID NO: 7), W139C, S481P, and D601G wherein the amino acids are numbered with respect to a CoV S polypeptide having an amino acid sequence of SEQ ID NO: 2. In embodiments, the CoV S polypeptide containing one or more modifications selected from: K973P, V974P, an inactivated furin cleavage site, optionally wherein the inactivated furin cleavage site is QQAQ (SEQ ID NO: 7), W139C, S481P, D601G, and L439R has the amino acid sequence of SEQ ID NO: 153. In embodiments, the CoV S polypeptide having the amino acid sequence of SEQ ID NO: 153 comprises a signal peptide having an amino acid sequence of SEQ ID NO: 117. In embodiments, the CoV S polypeptide having the amino acid sequence of SEQ ID NO: 153 comprises a signal peptide having an amino acid sequence of SEQ ID NO: 5.

[0220] In embodiments, the CoV S polypeptide contains one or more modifications selected from: K973P, V974P, an inactivated furin cleavage site, optionally wherein the inactivated furin cleavage site is QQAQ (SEQ ID NO: 7), T82I, D240G, E471K, D601G, and A688V, wherein the amino acids are numbered with respect to a CoV S polypeptide having an amino acid sequence of SEQ ID NO: 2. In embodiments, the CoV S polypeptide containing one or more modifications selected from: K973P, V974P, an inactivated furin cleavage site, optionally wherein the inactivated furin cleavage site is QQAQ (SEQ ID NO: 7), T82I, D240G, E471K, D601G, and A688V, wherein the amino acids are numbered with respect to a CoV S polypeptide having an amino acid sequence of SEQ ID NO: 2, has an amino acid sequence of SEQ ID NO: 156. In embodiments, the CoV S polypeptide containing one or more modifications selected from: K973P, V974P, an inactivated furin cleavage site, optionally wherein the inactivated furin cleavage site is QQAQ (SEQ ID NO: 7), T82I, D240G, E471K, D601G, and A688V, wherein the amino acids are numbered with respect to a CoV S polypeptide having an amino acid sequence of SEQ ID NO: 2, comprises a signal peptide having an amino acid sequence of SEQ ID NO: 154 or SEQ ID NO: 5.

[0221] In embodiments, the CoV S polypeptide contains one or more modifications selected from: K973P, V974P, an inactivated furin cleavage site, optionally wherein the inactivated furin cleavage site is QQAQ (SEQ ID NO: 7), T82I, D240G, S464N, D601G, and A688V, wherein the amino acids are numbered with respect to a CoV S polypeptide having an amino acid sequence of SEQ ID NO: 2. In embodiments, the CoV S polypeptide containing one or more modifications selected from: K973P, V974P, an inactivated furin cleavage site, optionally wherein the inactivated furin cleavage site is QQAQ (SEQ ID NO: 7), T82I, D240G, S464N, D601G, and A688V, wherein the amino acids are numbered with respect to a CoV S polypeptide having an amino acid sequence of SEQ ID NO: 2, has an amino acid sequence of SEQ ID NO: 158. In embodiments, the CoV S polypeptide containing one or more modifications selected from: K973P, V974P, an inactivated furin cleavage site, optionally wherein the inactivated furin cleavage site is QQAQ (SEQ ID NO: 7), T82I, D240G, S464N, D601G, and A688V, wherein the amino acids are numbered with respect to a CoV S polypeptide having an amino acid sequence of SEQ ID NO: 2, comprises a signal peptide of SEQ ID NO: 154.

[0222] In embodiments, the CoV S polypeptide contains one or more modifications selected from: K973P, V974P, an inactivated furin cleavage site, optionally wherein the inactivated furin cleavage site is QQAQ (SEQ ID NO: 7), deletion of amino acid 56, deletion of amino acid 57, deletion of amino acid 131, a N488Y mutation, an A557D mutation, a D601G mutation, a P668H mutation, a T703I mutation, a S969A mutation, and a D1105H mutation, wherein the CoV S polypeptide is numbered with respect to the wild-type SARS-COV-2 S polypeptide having the amino acid sequence of SEQ ID NO: 2. In embodiments, the CoV S polypeptide contains one or more modifications selected from: K973P, V974P, an inactivated furin cleavage site, optionally wherein the inactivated furin cleavage site is QQAQ (SEQ ID NO: 7), deletion of amino acid 56, deletion of amino acid 57, deletion of amino acid 132, a N488Y mutation, an A557D mutation, a D601G mutation, a P668H mutation, a T7031 mutation, a S969A mutation, and a D1105H mutation, wherein the CoV S polypeptide is numbered with respect to the wild-type SARS-COV-2 S polypeptide having the amino acid sequence of SEQ ID NO: 2.

[0223] In embodiments, the CoV S polypeptide contains one or more modifications selected from: K973P, V974P, an inactivated furin cleavage site, optionally wherein the inactivated furin cleavage site is QQAQ (SEQ ID NO: 7), a D67A mutation, a L229H mutation, a R233I mutation, an A688V mutation, an N488Y mutation, a K404N mutation, a E471K mutation, and a D601G mutation, wherein the CoV S polypeptide is numbered with respect to the wild-type SARS-COV-2 S polypeptide having the amino acid sequence of SEQ ID NO: 2.

[0224] In embodiments, the CoV S polypeptide contains one or more modifications selected from: K973P, V974P, an inactivated furin cleavage site, optionally wherein the inactivated furin cleavage site is QQAQ (SEQ ID NO: 7), a L5F mutation, a T7N mutation, a P13S mutation, a D125Y mutation, a R177S mutation, a K404T mutation, a E471K mutation, a N488Y mutation, a D601G mutation, a H642Y mutation, a T1014I mutation, and a T1163F mutation, wherein the CoV S polypeptide is numbered with respect to the wild-type SARS-COV-2 S polypeptide having the amino acid sequence of SEQ ID NO: 2.

[0225] In embodiments, the CoV S polypeptide contains one or more modifications selected from: K986P, V987P, an inactivated furin cleavage site, optionally wherein the inactivated furin cleavage site is QQAQ (SEQ ID NO: 7), a S13I mutation, a W152C mutation, and a L452R mutation, wherein the CoV S polypeptide is numbered with respect to the wild-type SARS-COV-2 S polypeptide having the amino acid sequence of SEQ ID NO: 1. In embodiments, the CoV S polypeptide contains one or more modifications selected from: K986P, V987P, an inactivated furin cleavage site, optionally wherein the inactivated furin cleavage site is QQAQ (SEQ ID NO: 7), a S13I mutation, a W152C mutation, and a L452R mutation, wherein the CoV S polypeptide is numbered with respect to the wild-type SARS-COV-2 S polypeptide having the amino acid sequence of SEQ ID NO: 1 lacks an N-terminal signal peptide.

[0226] In embodiments, the CoV S polypeptide contains one or more modifications selected from: K986P, V987P, A67V, T95I, G142D, L212I, G339D, S371L, S373P, S375F, K417N, N440K, G446S, S477N, T478K, E484A, Q493R, G496S, Q498R, N501Y, Y505H, T547K, D614G, H655Y, H679K, P681H, N764K, D796Y, N856K, Q954H, N969K, L981F, deletion of amino acids 69, 70, 143, 144, 145, and 211, and insertion of the amino acids EPE between amino acids 214 and 215, optionally wherein the inactivated furin cleavage site is QQAQ (SEQ ID NO: 7), wherein the CoV S polypeptide is numbered with respect to the wild-type SARS-COV-2 S polypeptide having the amino acid sequence of SEQ ID NO: 1. In embodiments, the CoV S polypeptide having one or more of the aforementioned modifications lacks an N-terminal signal peptide. In embodiments, the CoV S polypeptide has an amino acid sequence of SEQ ID NO: 159.

[0227] In embodiments, the CoV S polypeptide contains one or more modifications selected from: K986P, V987P, A67V, T951, G142D, L212I, G339D, S371L, S373P, S375F, K417N, N440K, G446S, S477N, T478K, E484A, Q493R, G496S, Q498R, N501Y, Y505H, T547K, D614G, H655Y, H679K, P681H, N764K, D796Y, N856K, Q954H, N969K, L981F, optionally wherein the inactivated furin cleavage site is QQAQ (SEQ ID NO: 7), wherein the CoV S polypeptide is numbered with respect to the wild-type SARS-COV-2 S polypeptide having the amino acid sequence of SEQ ID NO: 1. In embodiments, the CoV S polypeptide having one or more of the aforementioned modifications lacks an N-terminal signal peptide. In embodiments, the CoV S polypeptide has an amino acid sequence of SEQ ID NO: 160.

[0228] In embodiments, the CoV S polypeptide is any one of SEQ ID NOS: 159 or 167. In embodiments, the amino acid sequence of the CoV S polypeptide has at least 90%, at least 95%, at least 96%, at least 97%, at least 98%, at least 99%, or at least 99.5% identity to any one of SEQ ID NOS: 159 or 167. In embodiments, the CoV S polypeptide is any one of SEQ ID NOS: 160 or 170. In embodiments, the amino acid sequence of the CoV S polypeptide has at least 90%, at least 95%, at least 96%, at least 97%, at least 98%, at least 99%, or at least 99.5% identity to any one of SEQ ID NOS: 160 or 170.

[0229] In embodiments, the CoV S polypeptide is encoded by a nucleic acid of any one of SEQ ID NOS: 161, 162, 163, 164, 165, 166, 168, 169, 171, and 172. In embodiments, the CoV S polypeptide of any one of SEQ ID NOS: 160, 170, 159, or 167 lacks the N-terminal signal peptide. For example, the CoV S polypeptide comprises the polypeptide sequence of SEQ ID NOS: 160, 170, 159, or 167, which is C-terminal to MFVFLVLLPLVSS (SEQ ID NO: 5).

[0230] In embodiments, the CoV S polypeptide contains a set of modifications as described in the table below, wherein the modifications are numbered with respect to SEQ ID NO: 1. In embodiments, the CoV S polypeptide contains a set of modifications as described in the table below; an inactivated furin cleavage site (optionally wherein the furin cleavage site is QQAQ (SEQ ID NO: 7)), and K986P and V987P modifications, wherein the modifications are numbered with respect to SEQ ID NO: 1.

[0231] In embodiments, the CoV S polypeptide contains one or more modifications at amino acids 180, 252, 253, 444, 478, and 521, wherein the CoV S polypeptide is numbered according to the CoV S polypeptide of SEQ ID NO: 1.

[0232] In embodiments, provided herein are CoV S polypeptides with modifications compared to a CoV S polypeptide having an amino acid sequence with at least 90%, at least 91%, at least 92%, at least 93%, at least 94%, at least 95%, at least 96%, at least 97%, at least 98%, at least 99%, or at least 100% identity to any one of SEQ ID NOS: 245, 250, 255, 260, 265, 269, 273, and 277. In embodiments, the modifications occur at one or more of amino acid positions 180, 252, 253, 444, 478, 486, 521, wherein the modifications are numbered according to a CoV S polypeptide having the amino acid sequence of SEQ ID NO: 1.

| | Modification | Modification | Modificatio | Modificatio | Modificatio | Modificatio |
|---|---|---|---|---|---|---|
| | Combination 1 | Combination 2 | Combination 3 | Combination 4 | Combination 5 | Combination 6 |
| Mutations | T19R | A67V | T19R | W64H | T19R | D80A |
| | T95I | T95I, G142D | G142D | H66W | G142D | D215G |
| | G142D | G339D | E156G | D213V | E156G | L242H |
| | Y145H | S371L | K417N | L214R | K417N | K417N |
| | E156G | S373P | N439K | T19R | L452R | E484K |
| | A222V | S375F | L452R | G142D | T478K | N501Y |
| | K417N | K417N, E484K | T478K | E156G | E484Q | D614G |
| | L452R | T478K, N501Y | E484K | K417N | D614G | A701V |
| | T478K | N440K, Q493K | N501Y | N439K | P681R | |
| | D614G | G446S, Q498R | D614G | L452R | D950N | |
| | P681R | Y505H, T547K | P681R | T478K | | |
| | D950N | D614G, H655Y | D950N | E484K | | |
| | | N679K, P681H | W258I | N501Y | | |
| | | N764K, D796Y | | D614G | | |
| | | N856J, Q954H | | P681R | | |
| | | N969K, L981 | | D950N | | |
| | | | | W258I | | |
| Deletions | F157 del | H69-V70 del | F157 del | F157 del | F157 del | |
| Insertions | R158 del | 143-145del | R158 del | R158 del | R158 del | |
| | | 211-212del | | | | |
| | | Insertion of | | | | |
| | | EPE between | | | | |
| | | 214 and 215 | | | | |

[0233] In embodiments, the CoV Spike(S) polypeptides comprise a polypeptide linker. In embodiments, the polypeptide linker contains glycine and serine. In embodiments, the linker has about 50%, about 55%, about 60%, about 65%, about 70%, about 75%, about 80%, about 85%, about 90%, about 95%, or about 100% glycine.

[0234] In embodiments, the polypeptide linker has a repeat of (SGGG)n (SEQ ID NO: 91), wherein n is an integer from 1 to 50 (e.g. 1, 2, 3, 4, 5, 6, 7, 8, 9, 10, 11, 12, 13, 14, 15, 16, 17, 18, 19, 20, 21, 22, 23, 24, 25, 26, 27, 28, 29, 30, 31, 32, 33, 34, 35, 36, 37, 38, 39, 40, 41, 42, 43, 44, 45, 46, 47, 48, 49, or 50). In embodiments, the polypeptide linker has an amino acid sequence corresponding to SEQ ID NO: 90.

[0235] In embodiments, the polypeptide linker has a repeat of (GGGGS)n (SEQ ID NO: 93), wherein n is an integer from 1 to 50 (e.g. 1, 2, 3, 4, 5, 6, 7, 8, 9, 10, 11, 12, 13, 14, 15, 16, 17, 18, 19, 20, 21, 22, 23, 24, 25, 26, 27, 28, 29, 30, 31, 32, 33, 34, 35, 36, 37, 38, 39, 40, 41, 42, 43, 44, 45, 46, 47, 48, 49, or 50).

[0236] In embodiments, the polypeptide linker has a repeat of (GGGS)n (SEQ ID NO: 92), wherein n is an integer from 1 to 50 (e.g. 1, 2, 3, 4, 5, 6, 7, 8, 9, 10, 11, 12, 13, 14, 15, 16, 17, 18, 19, 20, 21, 22, 23, 24, 25, 26, 27, 28, 29, 30, 31, 32, 33, 34, 35, 36, 37, 38, 39, 40, 41, 42, 43, 44, 45, 46, 47, 48, 49, or 50).

[0237] In aspects, the polypeptide linker is a poly-(Gly)n linker, wherein n is 1, 2, 3, 4, 5, 6, 7, 8, 9, 10, 15, 16, 17, 18, 19, or 20. In other embodiments, the linker is selected from the group consisting of: dipeptides, tripeptides, and quadripeptides. In embodiments, the linker is a dipeptide selected from the group consisting of alanine-serine (AS), leucine-glutamic acid (LE), and serine-arginine (SR).

[0238] In embodiments, the polypeptide linker comprises between 1 to 100 contiguous amino acids of a naturally occurring CoV S polypeptide or of a CoV S polypeptide disclosed herein. In embodiments, the polypeptide linker has an amino acid sequence corresponding to SEQ ID NO: 94.

[0239] In embodiments, the CoV Spike(S) polypeptides comprise a foldon. In embodiments, the TMCT is replaced with a foldon. In embodiments, a foldon causes trimerization of the CoV Spike(S) polypeptide. In embodiments, the foldon is an amino acid sequence known in the art. In embodiments, the foldon has an amino acid sequence of SEQ ID NO: 68. In embodiments, the foldon is a T4 fibritin trimerization motif. In embodiments, the T4 fibritin trimerization domain has an amino acid sequence of SEQ ID NO: 103. In embodiments, the foldon is separated in amino acid sequence from the CoV Spike(S) polypeptide by a polypeptide linker. Non-limiting examples of polypeptide linkers are found throughout this disclosure.

[0240] In embodiments, the disclosure provides CoV S polypeptides comprising a fragment of a coronavirus S protein and nanoparticles and vaccines comprising the same. In embodiments, the fragment of the coronavirus S protein is between 10 and 1500 amino acids in length (e.g. about 10, about 20, about 30, about 40, about 50, about 60, about 70, about 80, about 90, about 100, about 150, about 200, about 250, about 300, about 350, about 400, about 450, about 500, about 550, about 600, about 650, about 700, about 750, about 800, about 850, about 900, about 950, about 1000, about 1050, about 1100, about 1150, about 1200, about 1250, about 1300, about 1350, about 1400, about 1450, or about 1500 amino acids in length). In embodiments, the fragment of the coronavirus S protein is selected from the group consisting of the receptor binding domain (RBD), subdomain 1, subdomain 2, upper helix, fusion peptide, connecting region, heptad repeat 1, central helix, heptad repeat 2, NTD, and TMCT.

[0241] In embodiments, the CoV S polypeptide comprises an RBD and a subdomain 1. In embodiments, the CoV S polypeptide comprising an RBD and a subdomain 1 is amino acids 319 to 591 of SEQ ID NO: 1.

[0242] In embodiments, the CoV S polypeptide contains a fragment of a coronavirus S protein, wherein the fragment of the coronavirus S protein is the RBD. Non-limiting examples of RBDs include the RBD of SARS-COV-2 (amino acid sequence=SEQ ID NO: 69), the RBD of SARS (amino acid sequence=SEQ ID NO: 70), and the RBD of MERS, (amino acid sequence=SEQ ID NO: 71).

[0243] In embodiments, the CoV S polypeptide contains two or more RBDs, which are connected by a polypeptide linker. In embodiments, the polypeptide linker has an amino acid sequence of SEQ ID NO: 90 or SEQ ID NO: 94.

[0244] In embodiments, the CoV S polypeptide contains 1, 2, 3, 4, 5, 6, 7, 8, 9, 10, 11, 12, 13, 14, 15, 16, 17, 18, 19, or 20 RBDs.

[0245] In some embodiments, the CoV S polypeptide contains two or more SARS-COV-2 RBDs, which are connected by a polypeptide linker. In embodiments, the antigen containing two or more SARS-COV-2 RBDs has an amino acid sequence corresponding to one of SEQ ID NOS: 72-75.

[0246] In embodiments, the CoV S polypeptide contains a SARS-COV-2 RBD and a SARS RBD. In embodiments, the CoV S polypeptide comprises a SARS-COV-2 RBD and a SARS RBD, wherein each RBD is separated by a polypeptide linker. In embodiments, the CoV S polypeptide comprising a SARS-COV-2 RBD and a SARS RBD has an amino acid sequence selected from the group consisting of SEQ ID NOS: 76-79.

[0247] In embodiments, the CoV S polypeptide contains a SARS-COV-2 RBD and a MERS RBD. In embodiments, the CoV S polypeptide comprises a SARS-COV-2 RBD and a MERS RBD, wherein each RBD is separated by a polypeptide linker.

[0248] In embodiments, the CoV S polypeptide comprises a SARS RBD and a MERS RBD. In embodiments, the CoV S polypeptide comprises a SARS RBD and a MERS RBD, wherein each RBD is separated by a polypeptide linker.

[0249] In embodiments, the CoV S polypeptide contains a SARS-COV-2 RBD, a SARS RBD, and a MERS RBD. In embodiments, the CoV S polypeptide contains a SARS-COV-2 RBD, a SARS

[0250] RBD, and a MERS RBD, wherein each RBD is separated by a polypeptide linker. In embodiments, the CoV S polypeptide comprising a SARS-COV-2 RBD, a SARS RBD, and a MERS RBD has an amino acid sequence selected from the group consisting of SEQ ID NOS: 80-83.

[0251] In embodiments, the CoV S polypeptides described herein are expressed with an N-terminal signal peptide. In embodiments, the N-terminal signal peptide has an amino acid sequence of SEQ ID NO: 5 (MFVFLVLLPLVSS). In embodiments, the N-terminal signal peptide has an amino acid sequence of SEQ ID NO: 117 (MFVFLVLLPLVSI). In embodiments, the N-terminal signal peptide has an amino acid sequence of SEQ ID NO: 154 (MFVFFVLLPLVSS). In embodiments, the N-terminal signal peptide has an amino acid sequence of SEQ ID NO: 193 (MFGFLVLLPLVSS). In embodiments, the signal peptide may be replaced with any signal peptide that enables expression of the CoV S protein. In embodiments, one or more of the CoV S protein signal peptide amino acids may be deleted or mutated. An initiating methionine residue is maintained to initiate expression. In embodiments, the CoV S polypeptides are encoded by a nucleic acid sequence selected from the group consisting of SEQ ID NO: 35, SEQ ID NO: 37, SEQ ID NO: 95, SEQ ID NO: 43, SEQ ID NO: 47, SEQ ID NO: 50, SEQ ID NO: 53, SEQ ID NO: 55, SEQ ID NO: 57, SEQ ID NO: 96, SEQ ID NO: 60, SEQ ID NO: 131, SEQ ID NO: 135, SEQ ID NO: 142, SEQ ID NO: 145, SEQ ID NO: 148, SEQ ID NO: 150, SEQ ID NO: 196, SEQ ID NO: 197; SEQ ID NO: 198; SEQ ID NO: 199; SEQ ID NO: 201; SEQ ID NO: 202; SEQ ID NO: 204; SEQ ID NO: 206; SEQ ID NO: 208; SEQ ID NO: 210; SEQ ID NO: 212; SEQ ID NO: 214; SEQ ID NO: 216; SEQ ID NO: 329; SEQ ID NO: 330; SEQ ID NO: 331; SEQ ID NO: 332; SEQ ID NO: 333; and SEQ ID NO: 334. In embodiments, the N-terminal signal peptide of the CoV S polypeptide contains a mutation at Ser-13 relative to the native CoV Spike(S) signal polypeptide (SEQ ID NO: 5). In embodiments, Ser-13 is mutated to any natural amino acid. In embodiments, Ser-13 is mutated to alanine, methionine, isoleucine, leucine, threonine, or valine. In embodiments, Ser-13 is mutated to isoleucine.

[0252] Following expression of the CoV S protein in a host cell, the N-terminal signal peptide is cleaved to provide the mature CoV protein sequence (SEQ ID NOS: 2, 4, 38, 41, 44, 48, 51, 54, 58, 61, 63, 65, 67, 73, 75, 78, 79, 82, 83, 85, 87, 89,106,110, 132, 133, 114, 138, 141, 144, 147, 151, 153, 156, 158, 174, 175, 176, 181-184, 186, 188, 190, 195, 217-228 233-236, 243, 255-264, 273-280, 283-284, 287-288, 291-292, 294, 296, 298, 300, 302, 304, 306, 308, 310, 312, 314, 316, 318, 320, 322, 324, 236, and 328). In embodiments, the signal peptide is cleaved by host cell proteases. In aspects, the full-length protein may be isolated from the host cell and the signal peptide cleaved subsequently.

[0253] Following cleavage of the signal peptide from a CoV Spike(S) polypeptide with an amino acid sequence corresponding to any one of SEQ ID NOS: 1, 3, 36, 40, 42, 46, 49, 52, 56, 59, 62, 64, 66, 72, 74, 76, 77, 80, 81, 84, 86, 87, 105, 107, 88, 109,130, 134, 136, 137, 140, 143, 146, 149, 152, 155, 157, 159, 160, 173, 177-180, 185, 189, 191, 194, 200, 203, 205, 207, 209, 211, 213, 215, 229-232, 242, 245-254, 265-272, 281-282, 285-286, 289-290, and 293, 295, 297, 299, 301, 303, 305, 307, 309, 311, 313, 315, 317, 319, 321, 323, 325, 327, 329, 330, 331, 332, 333, and 334 during expression and purification, a mature polypeptide having an amino acid sequence selected from the group consisting of SEQ ID NOS: 2, 4, 38, 41, 44, 48, 51, 54, 58, 61, 63, 65, 67, 73, 75, 78, 79, 82, 83, 85, 106, 108, 89, and 110, 112-115, 132, 133, 114, 138, 141, 144, 147, 151, 153, 156, 158, 174, 175, 176, 181-184, 186, 188, 190, 195, 217-228, 233-236, 243, 255-264, 273-280, 283, 284, 287, 288, 291, 292, and 294, 296, 298, 300, 302, 304, 306, 308, 310, 312, 314, 316, 318, 320, 322, 324, 236, and 328 is obtained and used to produce a CoV S nanoparticle vaccine or CoV S nanoparticles.

[0254] Advantageously, the disclosed CoV S polypeptides may have enhanced protein expression and stability relative to the native CoV Spike(S) protein.

[0255] In embodiments, the CoV S polypeptides described herein contain further modifications from the native coronavirus S protein (SEQ ID NO: 2). In embodiments, the coronavirus S proteins described herein exhibit at least 80%, at least 85%, at least 86%, at least 87%, at least 88%, at least 89%, at least 90%, at least 91%, at least 92%, at least 93%, at least 94%, at least 95%, at least 96%, at least 97%, at least 98%, at least 99% identity to the native coronavirus S protein. A person of skill in the art would use known techniques to calculate the percent identity of the recombinant coronavirus S protein to the native protein or to any of the CoV S polypeptides described herein. For example, percentage identity can be calculated using the tool CLUSTALW2, which is available online. The following default parameters may be used for CLUSTALW2 Pairwise alignment: Protein Weight Matrix=Gonnet; Gap Open=10; Gap Extension=0.1.

[0256] In embodiments, the CoV S polypeptides described herein are at least 90%, at least 91%, at least 92%, at least 93%, at least 94%, at least 95%, at least 96%, at least 97%, at least 98%, at least 99%, or at least 99.5% identical to the CoV S polypeptide having an amino acid sequence of any one of SEQ ID NO: 87, SEQ ID NO: 174, SEQ ID NO: 175, SEQ ID NO: 176, SEQ ID NOS: 181-184, SEQ ID NO: 186, SEQ ID NO: 188, SEQ ID NO: 190, SEQ ID NO: 195; SEQ ID NOS: 217-228, SEQ ID NOS: 233-236, and SEQ ID NO: 243, SEQ ID NOS 255-328; SEQ ID NOS: 329-333; SEQ ID NO: 334. A CoV S polypeptide may have a deletion, an insertion, or mutation of up to about 1, up to about 2, up to about 3, up to about 4, up to about 5, up to about 10, up to about 15, up to about 20, up to about 25, up to about 30, up to about 35, up to about 40, up to about 45, or up to about 50 amino acids compared to the amino acid sequence of the CoV S polypeptide having an amino acid sequence of any one of SEQ ID NO: 87, SEQ ID NO: 174, SEQ ID NO: 175, SEQ ID NO: 176, SEQ ID NOS: 181-184, SEQ ID NO: 186, SEQ ID NO: 188, SEQ ID NO: 190, SEQ ID NO: 195; SEQ ID NOS: 217-228, SEQ ID NOS: 233-236, SEQ ID NO: 243, and SEQ ID NOS: 255-328; SEQ ID NOS: 329-333; SEQ ID NO: 334. A CoV S polypeptide may have may have a deletion, an insertion, or mutation of between about 1 and about 5 amino acids, between about 3 and about 10 amino acids, between about 5 and 10 amino acids, between about 8 and 12 amino acids, between about 10 and 15 amino acids, between about 12 and 17 amino acids, between about 15 and 20 amino acids, between about 18 and 23 amino acids, between about 20 and 25 amino acids, between about 22 and about 27 amino acids, between about 25 and 30 amino acids, between about 30 and 35 amino acids, between about 35 and 40 amino acids, between about 40 and 45 amino acids, or between about 45 and 50 amino acids, as compared to the CoV S polypeptide having an amino acid sequence of any one of SEQ ID NO: 87, SEQ ID NO: 174, SEQ ID NO: 175, SEQ ID NO: 176, SEQ ID NOS: 181-184, SEQ ID NO: 186, SEQ ID NO: 188, SEQ ID NO: 190, SEQ ID NO: 195; SEQ ID NOS: 217-228, SEQ ID NOS: 233-236, SEQ ID NO: 243, and SEQ ID NOS: 255-302; SEQ ID NOS: 329-333; SEQ ID NO: 334. In embodiments, the CoV S polypeptides described herein comprise about 1, about 2, about 3, about 4, about 5, about 6, about 7, about 8, about 9, about 10, about 11, about 12, about 13, about 14, about 15, about 16, about 17, about 18, about 19, about 20, about 21, about 22, about 23, about 24, about 25, about 26, about 27, about 28, about 29, about 30, about 31, about 32, about 33, about 34, about 35, about 36, about 37, about 38, about 39, about 40, about 41, about 42, about 43, about 44, about 45, about 46, about 47, about 48, about 49, about 50, about 51, about 52, about 53, about 54, about 55, about 56, about 57, about 58, about 59, about 60, about 61, about 62, about 63, about 64, about 65, about 66, about 67, about 68, about 69, about 70, about 71, about 72, about 73, about 74, or about 75 deletions, insertions, or mutations compared to the coronavirus S protein having an amino acid sequence of any one of SEQ ID NO: 87, SEQ ID NO: 174, SEQ ID NO: 175, SEQ ID NO: 176, SEQ ID NOS: 181-184, SEQ ID NO: 186, SEQ ID NO: 188, SEQ ID NO: 190, SEQ ID NO: 195; SEQ ID NOS: 217-228, SEQ ID NOS: 233-236, SEQ ID NO: 243, SEQ ID NOS: 255-328; SEQ ID NOS: 329-333; SEQ ID NO: 334.

[0257] In embodiments, the coronavirus S polypeptide is extended at the N-terminus, the C-terminus, or both the N-terminus and the C-terminus. In aspects, the extension is a tag useful for a function, such as purification or detection. In aspects the tag contains an epitope. For example, the tag may be a polyglutamate tag, a FLAG-tag, a HA-tag, a polyHis-tag (having about 5-10 histidines) (SEQ ID NO: 101), a hexahistidine tag (SEQ ID NO: 100), an 8×-His-tag (having eight histidines) (SEQ ID NO: 102), a Myc-tag, a Glutathione-S-transferase-tag, a Green fluorescent protein-tag, Maltose binding protein-tag, a Thioredoxin-tag, or an Fc-tag. In other aspects, the extension may be an N-terminal signal peptide fused to the protein to enhance expression. While such signal peptides are often cleaved during expression in the cell, some nanoparticles may contain the antigen with an intact signal peptide. Thus, when a nanoparticle comprises an antigen, the antigen may contain an extension and thus may be a fusion protein when incorporated into nanoparticles. For the purposes of calculating identity to the sequence, extensions are not included. In embodiments, the tag is a protease cleavage site. Non-limiting examples of protease cleavage sites include the HRV3C protease cleavage site, chymotrypsin, trypsin, elastase, endopeptidase, caspase-1, caspase-2, caspase-3, caspase-4, caspase-5, caspase-6, caspase-7, caspase-8, caspase-9, caspase-10, enterokinase, factor Xa, Granzyme B, TEV protease, and thrombin. In embodiments, the protease cleavage site is an HRV3C protease cleavage site. In embodiments, the protease cleavage site comprises an amino acid sequence of SEQ ID NO: 98.

[0258] In embodiments, the CoV S glycoprotein comprises a fusion protein. In embodiments, the CoV S glycoprotein comprises an N-terminal fusion protein. In embodiments, the Cov S glycoprotein comprises a C-terminal fusion protein. In embodiments, the fusion protein encompasses a tag useful for protein expression, purification, or detection. In embodiments, the tag is a polyHis-tag (having about 5-10 histidines), a Myc-tag, a Glutathione-S-transferase-tag, a Green fluorescent protein-tag, Maltose binding protein-tag, a Thioredoxin-tag, a Strep-tag, a Twin-Strep-tag, or an Fc-tag. In embodiments, the tag is an Fc-tag. In embodiments, the Fc-tag is monomeric, dimeric, or trimeric. In embodiments, the tag is a hexahistidine tag, e.g. a polyHis-tag which contains six histidines (SEQ ID NO: 100). In embodiments, the tag is a Twin-Strep-tag with an amino acid sequence of SEQ ID NO: 99.

[0259] In embodiments, the CoV S polypeptide is a fusion protein comprising another coronavirus protein. In embodiments, the other coronavirus protein is from the same coronavirus. In embodiments, the other coronavirus protein is from a different coronavirus.

[0260] In aspects, the CoV S protein may be truncated. For example, the N-terminus may be truncated by about 10 amino acids, about 30 amino acids, about 50 amino acids, about 75 amino acids, about 100 amino acids, or about 200 amino acids. The C-terminus may be truncated instead of or in addition to the N-terminus. For example, the C-terminus may be truncated by about 10 amino acids, about 30 amino acids, about 50 amino acids, about 75 amino acids, about 100 amino acids, or about 200 amino acids. For purposes of calculating identity to the protein having truncations, identity is measured over the remaining portion of the protein.

### Nanoparticles Containing CoV Spike(S) Polypeptides

[0261] In embodiments, the mature CoV S polypeptide antigens are used to produce a vaccine comprising coronavirus S nanoparticles. In embodiments, nanoparticles of the present disclosure comprise the CoV S polypeptides described herein. In embodiments, the nanoparticles of the present disclosure comprise CoV S polypeptides associated with a detergent core. The presence of the detergent facilitates formation of the nanoparticles by forming a core that organizes and presents the antigens. In embodiments, the nanoparticles may contain the CoV S polypeptides assembled into multi-oligomeric glycoprotein-detergent (e.g. PS80) nanoparticles with the head regions projecting outward and hydrophobic regions and PS80 detergent forming a central core surrounded by the glycoprotein. In embodiments, the CoV S polypeptide inherently contains or is adapted to contain a transmembrane domain to promote association of the protein into a detergent core. In embodiments, the CoV S polypeptide contains a head domain. Primarily the transmembrane domains of a CoV S polypeptide trimer associate with detergent; however, other portions of the polypeptide may also interact. Advantageously, the nanoparticles have improved resistance to environmental stresses such that they provide enhanced stability and/or improved presentation to the immune system due to organization of multiple copies of the protein around the detergent.

[0262] In embodiments, the detergent core is a non-ionic detergent core. In embodiments, the CoV S polypeptide is associated with the non-ionic detergent core. In embodiments, the detergent is selected from the group consisting of polysorbate-20 (PS20), polysorbate-40 (PS40), polysorbate-60 (PS60), polysorbate-65 (PS65) and polysorbate-80 (PS80).

[0263] In embodiments, the detergent is PS80.

[0264] In embodiments, the CoV S polypeptide forms a trimer. In embodiments, the CoV S polypeptide nanoparticles are composed of multiple polypeptide trimers surrounding a non-ionic detergent core. In embodiments, the nanoparticles contain at least about 1 trimer or more. In embodiments, the nanoparticles contain at least about 5 trimers to about 30 trimers of the Spike protein. In embodiments, each nanoparticle may contain 1, 2, 3, 4, 5, 6, 7, 8, 9, 10, 11, 12, or 15, 20, 25, or 30 trimers, including all values and ranges in between. Compositions disclosed herein may contain nanoparticles having different numbers of trimers. For example, a composition may contain nanoparticles where the number of trimers ranges from 2-9; in embodiments, the nanoparticles in a composition may contain from 2-6 trimers. In embodiments, the compositions contain a heterogeneous population of nanoparticles having 2 to 6 trimers per nanoparticle, or 2 to 9 trimers per nanoparticle. In embodiments, the compositions may contain a substantially homogenous population of nanoparticles. For example, the population may contain about 95% nanoparticles having 5 trimers.

[0265] In embodiments, provided herein are nanoparticles having from 1 to 50 CoV S polypeptides, wherein the amino acid sequence of each CoV S polypeptide is different. In embodiments, the nanoparticles comprise 1, 2, 3, 4, 5, 6, 7, 8, 9, 10, 11, 12, 13, 14, 15, 16, 17, 18, 19, 20, 21, 22, 23, 24, 25, 26, 27, 28, 29, 30, 31, 32, 33, 34, 35, 36, 37, 38, 39, 40, 41, 42, 43, 44, 45, 46, 47, 48, 49, or 50 different CoV S polypeptides.

[0266] The nanoparticles disclosed herein range in particle size. In embodiments, the nanoparticles disclosed herein range in particle size from a Z-ave size from about 20 nm to about 60 nm, about 20 nm to about 50 nm, about 20 nm to about 45 nm, about 20 nm to about 35 nm, about 20 nm to about 30 nm, about 25 nm to about 35 nm, about 25 nm to about 45 nm, about 30 nm to about 120 nm, about 30 nm to about 80 nm, about 30 nm to about 60 nm, about 30 nm to about 65 nm, or from about 30 nm to about 50 nm. Particle size (Z-ave) is measured by dynamic light scattering (DLS) using a Zetasizer NanoZS (Malvern, UK), unless otherwise specified.

[0267] In embodiments, the nanoparticles comprising the CoV S polypeptides disclosed herein have a reduced particle size compared to nanoparticles comprising a wild-type CoV S polypeptide. In embodiments, the CoV S polypeptides are at least about 40% smaller in particle size, for example, at least about 40%, at least about 45%, at least about 50%, at least about 55%, at least about 60%, at least about 65%, at least about 70%, at least about 75%, at least about 80%, or at least about 85% smaller in particle size.

[0268] The nanoparticles comprising CoV S polypeptides disclosed herein are more homogenous in size, shape, and mass than nanoparticles comprising a wild-type CoV S polypeptide. The polydispersity index (PDI), which is a measure of heterogeneity, is measured by dynamic light scattering using a Malvern Setasizer unless otherwise specified. In embodiments, the particles measured herein have a PDI from about 0.1 to about 0.45, for example, about 0.1, about 0.2, about 0.25, about 0.29, about 0.3, about 0.35, about 0.40, or about 0.45. In embodiments, the nanoparticles measured herein have a PDI that is at least about 25% smaller than the PDI of nanoparticles comprising the wild-type CoV S polypeptide of SEQ ID NO: 2, for example, at least about 25%, at least about 30%, at least about 35%, at least about 40%, at least about 45%, at least about 50%, at least about 55%, or at least about 60%, smaller.

[0269] The CoV S polypeptides and nanoparticles comprising the same have improved thermal stability as compared to the wild-type CoV S polypeptide or a nanoparticle thereof. The thermal stability of the CoV S polypeptides is measured using differential scanning calorimetry (DSC) unless otherwise specified. The enthalpy of transition (ΔHcal) is the energy required to unfold a CoV S polypeptide. In embodiments, the CoV S polypeptides have an increased ΔHcal as compared to the wild-type CoV S polypeptide. In embodiments, the ΔHcal of a CoV S polypeptide is about 2-fold, about 3-fold, about 4-fold, about 5-fold, about 6-fold, about 7-fold, about 8-fold, about 9-fold, or about 10-fold greater than the ΔHcal of a wild-type CoV S polypeptide.

[0270] Several nanoparticle types may be included in vaccine compositions disclosed herein. In aspects, the nanoparticle type is in the form of an anisotropic rod, which may be a dimer or a monomer. In other aspects, the nanoparticle type is a spherical oligomer. In yet other aspects, the nanoparticle may be described as an intermediate nanoparticle, having sedimentation properties intermediate between the first two types. Formation of nanoparticle types may be regulated by controlling detergent and protein concentration during the production process. Nanoparticle type may be determined by measuring sedimentation co-efficient.

### Production of Nanoparticles Containing CoV S Polypeptide Antigens

[0271] The nanoparticles of the present disclosure are non-naturally occurring products, the components of which do not occur together in nature. Generally, the methods disclosed herein use a detergent exchange approach wherein a first detergent is used to isolate a protein and then that first detergent is exchanged for a second detergent to form the nanoparticles.

[0272] The antigens contained in the nanoparticles are typically produced by recombinant expression in host cells. Standard recombinant techniques may be used. In embodiments, the CoV S polypeptides are expressed in insect host cells using a baculovirus system. In embodiments, from 1-50 CoV S polypeptides are co-expressed in a host cell. In embodiments, the baculovirus is a cathepsin-L knock-out baculovirus, a chitinase knock-out baculovirus. Optionally, the baculovirus is a double knock-out for both cathepsin-L and chitinase. High level expression may be obtained in insect cell expression systems. Non limiting examples of insect cells are, Spodoptera frugiperda (Sf) cells, e.g. Sf9, Sf21, Trichoplusiani cells, e.g. High Five cells, and Drosophila S2 cells. In embodiments, the CoV S polypeptide described herein are produced in any suitable host cell. In embodiments, the host cell is an insect cell. In embodiments, the insect cell is an Sf9 cell.

[0273] Typical transfection and cell growth methods can be used to culture the cells. Vectors, e.g., vectors comprising polynucleotides that encode fusion proteins, can be transfected into host cells according to methods well known in the art. For example, introducing nucleic acids into eukaryotic cells can be achieved by calcium phosphate co-precipitation, electroporation, microinjection, lipofection, and transfection employing polyamine transfection reagents. In one embodiment, the vector is a recombinant baculovirus.

[0274] Methods to grow host cells include, but are not limited to, batch, batch-fed, continuous and perfusion cell culture techniques. Cell culture means the growth and propagation of cells in a bioreactor (a fermentation chamber) where cells propagate and express protein (e.g. recombinant proteins) for purification and isolation. Typically, cell culture is performed under sterile, controlled temperature and atmospheric conditions in a bioreactor. A bioreactor is a chamber used to culture cells in which environmental conditions such as temperature, atmosphere, agitation and/or pH can be monitored. In one embodiment, the bioreactor is a stainless steel chamber. In another embodiment, the bioreactor is a pre-sterilized plastic bag (e.g. Cellbag®, Wave Biotech, Bridgewater, N.J.). In other embodiment, the pre-sterilized plastic bags are about 50 L to 3500 L bags.

### Extraction and Purification of Nanoparticles Containing CoV Spike(S) Protein Antigens

[0275] After growth of the host cells, the protein may be harvested from the host cells using detergents and purification protocols. In embodiments, multiple CoV S proteins are purified simultaneously. In embodiments, host cells expressing multiple CoV S proteins arc pooled together. Once the host cells have grown for 48 to 96 hours, the cells are isolated from the media and a detergent-containing solution is added to solubilize the cell membrane, releasing the protein in a detergent extract. Triton X-100 and TERGITOL® nonylphenol ethoxylate, also known as NP-9, are each preferred detergents for extraction. The detergent may be added to a final concentration of about 0.1% to about 1.0%. For example, the concentration may be about 0.1%, about 0.2%, about 0.3%, about 0.5%, about 0.7%, about 0.8%, or about 1.0%. The range may be about 0.1% to about 0.3%. In aspects, the concentration is about 0.5%.

[0276] In other aspects, different first detergents may be used to isolate the protein from the host cell. For example, the first detergent may be Bis (polyethylene glycol bis[imidazoylcarbonyl]), nonoxynol-9, Bis (polyethylene glycol bis[imidazoyl carbonyl]), BRIJ® Polyethylene glycol dodecyl ether 35, BRIJ® Polyethylene glycol (3) cetyl ether 56, BRIJ® alcohol ethoxylate 72, BRIJ® Polyoxyl 2 stearyl ether 76, BRIJ® polyethylene glycol monoolelyl ether 92V, BRIJ® Polyoxyethylene (10) oleyl ether 97, BRIJ® Polyethylene glycol hexadecyl ether 58P, CREMOPHOR® EL Macrogolglycerol ricinoleate, Decaethyleneglycol monododecyl ether, N-Decanoyl-N-methylglucamine, n-Decyl alpha-Dglucopyranoside, Decyl beta-D-maltopyranoside, n-Dodecanoyl-N-methylglucamide, nDodecyl alpha-D-maltoside, n-Dodecyl beta-D-maltoside, n-Dodecyl beta-D-maltoside, Heptaethylene glycol monodecyl ether, Heptaethylene glycol monododecyl ether, Heptaethylene glycol monotetradecyl ether, n-Hexadecyl beta-D-maltoside, Hexaethylene glycol monododecyl ether, Hexaethylene glycol monohexadecyl ether, Hexaethylene glycol monooctadecyl ether, Hexaethylene glycol monotetradecyl ether, Igepal CA-630, Igepal CA-630, Methyl-6-O-(N-heptylcarbamoyl)-alpha-D-glucopyranoside, Nonaethylene glycol monododecyl ether, N-Nonanoyl-N-methylglucamine, N-Nonanoyl N-methylglucamine, Octaethylene glycol monodecyl ether, Octaethylene glycolmonododecyl ether, Octaethylene glycol monohexadecyl ether, Octaethylene glycol monooctadecyl ether, Octaethylene glycol monotetradecyl ether, Octyl-beta-D glucopyranoside, Pentaethylene glycol monodecyl ether, Pentaethylene glycol monododecyl ether, Pentaethylene glycol monohexadecyl ether, Pentaethylene glycol monohexyl ether, Pentaethylene glycol monooctadecyl ether, Pentaethylene glycol monooctyl ether, Polyethylene glycol diglycidyl ether, Polyethylene glycol ether W-1, Polyoxyethylene 10 tridecyl ether, Polyoxyethylene 100 stearate, Polyoxyethylene 20 isohexadecyl ether, Polyoxyethylene 20 oleyl ether, Polyoxyethylene 40 stearate, Polyoxyethylene 50 stearate, Polyoxyethylene 8 stearate, Polyoxyethylene bis (imidazolyl carbonyl), Polyoxyethylene 25 propylene glycol stearate, Saponin from Quillaja bark, SPAN® 20 sorbitan laurate, SPAN® 40 sorbitan monopalmitate, SPAN® 60 sorbitan stearate, SPAN® 65 sorbitan tristearate, SPAN® 80 sorbitane monooleate, SPAN® 85 sorbitane trioleate, TERGITOL® secondary alcohol ethoxylate Type 15-S-12, TERGITOL® secondary alcohol ethoxylate Type 15-S-30, TERGITOL® secondary alcohol ethoxylate Type 15-S-5, TERGITOL® secondary alcohol ethoxylate Type 15-S-7, TERGITOL® secondary alcohol ethoxylate Type 15-S-9, TERGITOL® nonylphenol ethoxylate Type NP-10, TERGITOL® nonylphenol ethoxylate Type NP-4, TERGITOL® nonylphenol ethoxylate Type NP-40, TERGITOL® nonylphenol ethoxylate Type NP-7, TERGITOL® nonylphenol ethoxylate Type NP-9, TERGITOL® branched secondary alcohol ethoxylate Type TMN-10, TERGITOL® branched secondary alcohol ethoxylate Type TMN-6, TRITON™ X-100 Polyethylene glycol tert-octylphenyl ether or combinations thereof.

[0277] The nanoparticles may then be isolated from cellular debris using centrifugation. In embodiments, gradient centrifugation, such as using cesium chloride, sucrose and iodixanol, may be used. Other techniques may be used as alternatives or in addition, such as standard purification techniques including, e.g., ion exchange, affinity, and gel filtration chromatography.

[0278] For example, the first column may be an ion exchange chromatography resin, such as FRACTOGEL® EMD methacrylate based polymeric beads TMAE (EMD Millipore), the second column may be a lentil (Lens culinaris) lectin affinity resin, and the third column may be a cation exchange column such as a FRACTOGEL® EMD methacrylate based polymeric beads SO3 (EMD Millipore) resin. In other aspects, the cation exchange column may be an MMC column or a Nuvia C Prime column (Bio-Rad Laboratories, Inc). Preferably, the methods disclosed herein do not use a detergent extraction column; for example a hydrophobic interaction column. Such a column is often used to remove detergents during purification but may negatively impact the methods disclosed here.

### Detergent Exchange of Nanoparticles Containing CoV S Polypeptide Antigens

[0279] To form nanoparticles, the first detergent, used to extract the protein from the host cell is substantially replaced with a second detergent to arrive at the nanoparticle structure. NP-9 is a preferred extraction detergent. Typically, the nanoparticles do not contain detectable NP-9 when measured by HPLC. The second detergent is typically selected from the group consisting of PS20, PS40, PS60, PS65, and PS80. Preferably, the second detergent is PS80.

[0280] In particular aspects, detergent exchange is performed using affinity chromatography to bind glycoproteins via their carbohydrate moiety. For example, the affinity chromatography may use a legume lectin column. Legume lectins are proteins originally identified in plants and found to interact specifically and reversibly with carbohydrate residues. See, for example, Sharon and Lis, “Legume lectins--a large family of homologous proteins,” FASEB J. 1990 November; 4 (14): 3198-208; Liener, “The Lectins: Properties, Functions, and Applications in Biology and Medicine,” Elsevier, 2012. Suitable lectins include concanavalin A (con A), pea lectin, sainfoin lect, and lentil lectin. Lentil lectin is a preferred column for detergent exchange due to its binding properties. Lectin columns are commercially available; for example, Capto Lentil Lectin, is available from GE Healthcare. In certain aspects, the lentil lectin column may use a recombinant lectin. At the molecular level, it is thought that the carbohydrate moieties bind to the lentil lectin, freeing the amino acids of the protein to coalesce around the detergent resulting in the formation of a detergent core providing nanoparticles having multiple copies of the antigen, e.g., glycoprotein oligomers which can be dimers, trimers, or tetramers anchored in the detergent. In embodiments, the CoV S polypeptides form trimers. In embodiments, the CoV S polypeptide trimers are anchored in detergent. In embodiments, each CoV S polypeptide nanoparticle contains at least one trimer associated with a non-ionic core.

[0281] The detergent, when incubated with the protein to form the nanoparticles during detergent exchange, may be present at up to about 0.1% (w/v) during early purifications steps and this amount is lowered to achieve the final nanoparticles having optimum stability. For example, the non-ionic detergent (e.g., PS80) may be about 0.005% (v/v) to about 0.1% (v/v), for example, about 0.005% (v/v), about 0.006% (v/v), about 0.007% (v/v), about 0.008% (v/v), about 0.009% (v/v), about 0.01% (v/v), about 0.015% (v/v), about 0.02% (v/v), about 0.025% (v/v), about 0.03% (v/v), about 0.035% (v/v), about 0.04% (v/v), about 0.045% (v/v), about 0.05% (v/v), about 0.055% (v/v), about 0.06% (v/v), about 0.065% (v/v), about 0.07% (v/v), about 0.075% (v/v), about 0.08% (v/v), about 0.085% (v/v), about 0.09% (v/v), about 0.095% (v/v), or about 0.1% (v/v) PS80. In embodiments, the nanoparticle contains about 0.03% to about 0.05% PS80. In embodiments, the nanoparticle contains about 0.01% (v/v) PS80.

[0282] In embodiments, purified CoV S polypeptides are dialyzed. In embodiments, dialysis occurs after purification. In embodiments, the CoV S polypeptides are dialyzed in a solution comprising sodium phosphate, NaCl, and PS80. In embodiments, the dialysis solution comprising sodium phosphate contains between about 5 mM and about 100 mM of sodium phosphate, for example, about 5 mM, about 10 mM, about 15 mM, about 20 mM, about 25 mM, about 30 mM, about 35 mM, about 40 mM, about 45 mM, about 50 mM, about 55 mM, about 60 mM, about 65 mM, about 70 mM, about 75 mM, about 80 mM, about 85 mM, about 90 mM, about 95 mM, or about 100 mM sodium phosphate. In embodiments, the pH of the solution comprising sodium phosphate is about 6.5, about 6.6, about 6.7, about 6.8, about 6.9, about 7.0, about 7.1, about 7.2, about 7.3, about 7.4, or about 7.5. In embodiments, the dialysis solution comprising sodium chloride comprises about 50 mM NaCl to about 500 mM NaCl, for example, about 50 mM, about 60 mM, about 70 mM, about 80 mM, about 90 mM, about 100 mM, about 110 mM, about 120 mM, about 130 mM, about 140 mM, about 150 mM, about 160 mM, about 170 mM, about 180 mM, about 190 mM, about 200 mM, about 210 mM, about 220 mM, about 230 mM, about 240 mM, about 250 mM, about 260 mM, about 270 mM, about 280 mM, about 290 mM, about 300 mM, about 310 mM, about 320 mM, about 330 mM, about 340 mM, about 350 mM, about 360 mM, about 370 mM, about 380 mM, about 390 mM, about 400 mM, about 410 mM, about 420 mM, about 430 mM, about 440 mM, about 450 mM, about 460 mM, about 470 mM, about 480 mM, about 490 mM, or about 500 mM NaCl. In embodiments, the dialysis solution comprising PS80 comprises about 0.005% (v/v), about 0.006% (v/v), about 0.007% (v/v), about 0.008% (v/v), about 0.009% (v/v), about 0.01% (v/v), about 0.015% (v/v), about 0.02% (v/v), about 0.025% (v/v), about 0.03% (v/v), about 0.035% (v/v), about 0.04% (v/v), about 0.045% (v/v), about 0.05% (v/v), about 0.055% (v/v), about 0.06% (v/v), about 0.065% (v/v), about 0.07% (v/v), about 0.075% (v/v), about 0.08% (v/v), about 0.085% (v/v), about 0.09% (v/v), about 0.095% (v/v), or about 0.1% (v/v) PS80. In embodiments, the dialysis solution comprises about 25 mM sodium phosphate (pH 7.2), about 300 mM NaCl, and about 0.01% (v/v) PS80.

[0283] Detergent exchange may be performed with proteins purified as discussed above and purified, frozen for storage, and then thawed for detergent exchange.

[0284] Stability of compositions disclosed herein may be measured in a variety of ways. In one approach, a peptide map may be prepared to determine the integrity of the antigen protein after various treatments designed to stress the nanoparticles by mimicking harsh storage conditions. Thus, a measure of stability is the relative abundance of antigen peptides in a stressed sample compared to a control sample. For example, the stability of nanoparticles containing the CoV S polypeptides may be evaluated by exposing the nanoparticles to various pHs, proteases, salt, oxidizing agents, including but not limited to hydrogen peroxide, various temperatures, freeze/thaw cycles, and agitation. It is thought that the position of the glycoprotein anchored into the detergent core provides enhanced stability by reducing undesirable interactions. For example, the improved protection against protease-based degradation may be achieved through a shielding effect whereby anchoring the glycoproteins into the core at the molar ratios disclosed herein results in steric hindrance blocking protease access. Stability may also be measured by monitoring intact proteins.

### Immunogenic Compositions Containing CoV S Polypeptide Antigens

[0285] In embodiments, provided herein are immunogenic compositions comprising from 1 to 50, from 2 to 50, from 3 to 50, from 4 to 50, from 5 to 50, from 1 to 25, from 2 to 25, from 3 to 25, from 4 to 25, from 5 to 25, from 1 to 10, from 2 to 10, from 3 to 10, from 4 to 10, from 5 to 10, of from 3 to 8 CoV S glycoproteins. In embodiments, provided herein are immunogenic compositions comprising five different CoV S glycoproteins. In embodiments, the CoV S glycoproteins are in the form of nanoparticles. In embodiments, a nanoparticle comprises from 1 to 50, from 2 to 50, from 3 to 50, from 4 to 50, from 5 to 50, from 1 to 25, from 2 to 25, from 3 to 25, from 4 to 25, from 5 to 25, from 1 to 10, from 2 to 10, from 3 to 10, from 4 to 10, from 5 to 10, of from 3 to 8 CoV S glycoproteins. In embodiments, a nanoparticle comprises 1, 2, 3, 4, 5, 6, 7, 8, 9, 10, 11, 12, 13, 14, 15, 16, 17, 18, 19, 20, 21, 22, 23, 24, 25, 26, 27, 28, 29, 30, 31, 32, 33, 34, 35, 36, 37, 38, 39, 40, 41, 42, 43, 44, 45, 46, 47, 48, 49, or 50 CoV S glycoproteins.

[0286] In embodiments, the immunogenic composition comprises a CoV S glycoprotein with at least 90%, a least 91%, at least 92%, at least 93%, at least 94%, at least 95%, at least 96%, at least 97%, at least 98%, at least 99%, or 100% identity to a CoV S glycoprotein of SEQ ID NO: 260. In embodiments, the immunogenic composition further comprises from 1-10 additional CoV S glycoproteins. In embodiments, the immunogenic composition comprises a CoV S glycoprotein with at least 90%, a least 91%, at least 92%, at least 93%, at least 94%, at least 95%, at least 96%, at least 97%, at least 98%, at least 99%, or 100% identity to a CoV S glycoprotein of SEQ ID NO: 261. In embodiments, the immunogenic composition comprises a CoV S glycoprotein with at least 90%, a least 91%, at least 92%, at least 93%, at least 94%, at least 95%, at least 96%, at least 97%, at least 98%, at least 99%, or 100% identity to a CoV S glycoprotein of SEQ ID NO: 262. In embodiments, the immunogenic composition comprises a CoV S glycoprotein with at least 90%, a least 91%, at least 92%, at least 93%, at least 94%, at least 95%, at least 96%, at least 97%, at least 98%, at least 99%, or 100% identity to a CoV S glycoprotein of SEQ ID NO: 263. In embodiments, the immunogenic composition comprises a CoV S glycoprotein with at least 90%, a least 91%, at least 92%, at least 93%, at least 94%, at least 95%, at least 96%, at least 97%, at least 98%, at least 99%, or 100% identity to a CoV S glycoprotein of SEQ ID NO: 264. In embodiments, the immunogenic composition comprises a CoV S glycoprotein with at least 90%, a least 91%, at least 92%, at least 93%, at least 94%, at least 95%, at least 96%, at least 97%, at least 98%, at least 99%, or 100% identity to a CoV S glycoprotein of SEQ ID NO: 87. In embodiments, the immunogenic composition comprises a CoV S glycoprotein with at least 90%, a least 91%, at least 92%, at least 93%, at least 94%, at least 95%, at least 96%, at least 97%, at least 98%, at least 99%, or 100% identity to a CoV S glycoprotein of any one of SEQ ID NOS: 244-328.

[0287] In embodiments, the immunogenic composition comprises a CoV S glycoprotein with at least 90%, a least 91%, at least 92%, at least 93%, at least 94%, at least 95%, at least 96%, at least 97%, at least 98%, at least 99%, or 100% identity to a CoV S glycoprotein of SEQ ID NO: 274. In embodiments, the immunogenic composition further comprises from 1-10 additional CoV S glycoproteins. In embodiments, the immunogenic composition comprises a CoV S glycoprotein with at least 90%, a least 91%, at least 92%, at least 93%, at least 94%, at least 95%, at least 96%, at least 97%, at least 98%, at least 99%, or 100% identity to a CoV S glycoprotein of SEQ ID NO: 276. In embodiments, the immunogenic composition comprises a CoV S glycoprotein with at least 90%, a least 91%, at least 92%, at least 93%, at least 94%, at least 95%, at least 96%, at least 97%, at least 98%, at least 99%, or 100% identity to a CoV S glycoprotein of SEQ ID NO: 278. In embodiments, the immunogenic composition comprises a CoV S glycoprotein with at least 90%, a least 91%, at least 92%, at least 93%, at least 94%, at least 95%, at least 96%, at least 97%, at least 98%, at least 99%, or 100% identity to a CoV S glycoprotein of SEQ ID NO: 280. In embodiments, the immunogenic composition comprises a CoV S glycoprotein with at least 90%, a least 91%, at least 92%, at least 93%, at least 94%, at least 95%, at least 96%, at least 97%, at least 98%, at least 99%, or 100% identity to a CoV S glycoprotein of SEQ ID NO: 87. In embodiments, the immunogenic composition comprises a CoV S glycoprotein with at least 90%, a least 91%, at least 92%, at least 93%, at least 94%, at least 95%, at least 96%, at least 97%, at least 98%, at least 99%, or 100% identity to a CoV S glycoprotein of any one of SEQ ID NOS: 244-328.

[0288] In embodiments, the immunogenic composition comprises a CoV S glycoprotein with at least 90%, a least 91%, at least 92%, at least 93%, at least 94%, at least 95%, at least 96%, at least 97%, at least 98%, at least 99%, or 100% identity to a CoV S glycoprotein of SEQ ID NO: 284. In embodiments, the immunogenic composition further comprises from 1-10 additional CoV S glycoproteins. In embodiments, the immunogenic composition comprises a CoV S glycoprotein with at least 90%, a least 91%, at least 92%, at least 93%, at least 94%, at least 95%, at least 96%, at least 97%, at least 98%, at least 99%, or 100% identity to a CoV S glycoprotein of SEQ ID NO: 288. In embodiments, the immunogenic composition comprises a CoV S glycoprotein with at least 90%, a least 91%, at least 92%, at least 93%, at least 94%, at least 95%, at least 96%, at least 97%, at least 98%, at least 99%, or 100% identity to a CoV S glycoprotein of SEQ ID NO: 292. In embodiments, the immunogenic composition comprises a CoV S glycoprotein with at least 90%, a least 91%, at least 92%, at least 93%, at least 94%, at least 95%, at least 96%, at least 97%, at least 98%, at least 99%, or 100% identity to a CoV S glycoprotein of SEQ ID NO: 87. In embodiments, the immunogenic composition comprises a CoV S glycoprotein with at least 90%, a least 91%, at least 92%, at least 93%, at least 94%, at least 95%, at least 96%, at least 97%, at least 98%, at least 99%, or 100% identity to a CoV S glycoprotein of any one of SEQ ID NOS: 244-328.

[0289] In embodiments, the immunogenic composition comprises a CoV S glycoprotein with at least 90%, a least 91%, at least 92%, at least 93%, at least 94%, at least 95%, at least 96%, at least 97%, at least 98%, at least 99%, or 100% identity to a CoV S glycoprotein of SEQ ID NO: 260. In embodiments, the immunogenic composition comprises a CoV S glycoprotein with at least 90%, a least 91%, at least 92%, at least 93%, at least 94%, at least 95%, at least 96%, at least 97%, at least 98%, at least 99%, or 100% identity to a CoV S glycoprotein of SEQ ID NO: 274. In embodiments, the immunogenic composition comprises a CoV S glycoprotein with at least 90%, a least 91%, at least 92%, at least 93%, at least 94%, at least 95%, at least 96%, at least 97%, at least 98%, at least 99%, or 100% identity to a CoV S glycoprotein of SEQ ID NO: 222. In embodiments, the immunogenic composition comprises a CoV S glycoprotein with at least 90%, a least 91%, at least 92%, at least 93%, at least 94%, at least 95%, at least 96%, at least 97%, at least 98%, at least 99%, or 100% identity to a CoV S glycoprotein of SEQ ID NO: 87 and a CoV S glycoprotein with at least 90%, a least 91%, at least 92%, at least 93%, at least 94%, at least 95%, at least 96%, at least 97%, at least 98%, at least 99%, or 100% identity to a CoV S glycoprotein of SEQ ID NO: 274. In embodiments, the immunogenic composition comprises a CoV S glycoprotein with at least 90%, a least 91%, at least 92%, at least 93%, at least 94%, at least 95%, at least 96%, at least 97%, at least 98%, at least 99%, or 100% identity to a CoV S glycoprotein of SEQ ID NO: 87 and a CoV S glycoprotein with at least 90%, a least 91%, at least 92%, at least 93%, at least 94%, at least 95%, at least 96%, at least 97%, at least 98%, at least 99%, or 100% identity to a CoV S glycoprotein of SEQ ID NO: 222. In embodiments, the immunogenic composition comprises a CoV S glycoprotein with at least 90%, a least 91%, at least 92%, at least 93%, at least 94%, at least 95%, at least 96%, at least 97%, at least 98%, at least 99%, or 100% identity to a CoV S glycoprotein of any one of SEQ ID NOS: 244-328.

[0290] In embodiments, the immunogenic compositions are vaccine compositions. In aspects, the immunogenic composition may contain nanoparticles with antigens from more than one viral strain from the same species of virus. In another embodiment, the disclosures provide for a pharmaceutical pack or kit comprising one or more containers filled with one or more of the components of the immunogenic compositions.

[0291] Compositions disclosed herein may be used either prophylactically or therapeutically, but will typically be prophylactic. Accordingly, the disclosure includes methods for treating or preventing infection. The methods involve administering to the subject a therapeutic or prophylactic amount of the immunogenic compositions of the disclosure. Preferably, the pharmaceutical composition is a vaccine composition that provides a protective effect. In other aspects, the protective effect may include amelioration of a symptom associated with infection in a percentage of the exposed population. For example, the composition may prevent or reduce one or more virus disease symptoms selected from: fever fatigue, muscle pain, headache, sore throat, vomiting, diarrhea, rash, symptoms of impaired kidney and liver function, internal bleeding and external bleeding, compared to an untreated subject.

[0292] The nanoparticles may be formulated for administration as vaccines in the presence of various excipients, buffers, and the like. For example, the vaccine compositions may contain sodium phosphate, sodium chloride, and/or histidine. Sodium phosphate may be present at about 10 mM to about 50 mM, about 15 mM to about 25 mM, or about 25 mM; in particular cases, about 22 mM sodium phosphate is present. Histidine may be present about 0.1% (w/v), about 0.5% (w/v), about 0.7% (w/v), about 1% (w/v), about 1.5% (w/v), about 2% (w/v), or about 2.5% (w/v). Sodium chloride, when present, may be about 150 mM. In certain compositions, the sodium chloride may be present in higher concentrations, for example from about 200 mM to about 500 mM. In embodiments, the sodium chloride is present in a high concentration, including but not limited to about 200 mM, about 250 mM, about 300 mM, about 350 mM, about 400 mM, about 450 mM, or about 500 mM.

[0293] In embodiments, the nanoparticles described herein have improved stability at certain pH levels. In embodiments, the nanoparticles are stable at slightly acidic pH levels. For example, the nanoparticles that are stable at a slightly acidic pH, for example from pH 5.8 to pH 7.0. In embodiments, the nanoparticles and compositions containing nanoparticles may be stable at pHs ranging from about pH 5.8 to about pH 7.0, including about pH 5.9 to about pH 6.8, about pH 6.0 to about pH 6.5, about pH 6.1 to about pH 6.4, about pH 6.1 to about pH 6.3, or about pH 6.2. In embodiments, the nanoparticles and compositions described herein are stabile at neutral pHs, including from about pH 7.0 to about pH 7.4. In embodiments, the nanoparticles and compositions described herein are stable at slightly alkaline pHs, for example from about pH 7.0 to about pH 8.5, from about pH 7.0 to about pH 8.0, or from about pH 7.0 to about pH 7.5, including all values and ranges in between.

### Adjuvants

[0294] In embodiments, the compositions disclosed herein may be combined with one or more adjuvants to enhance an immune response. In embodiments, the compositions are prepared without adjuvants, and are thus available to be administered as adjuvant-free compositions. Advantageously, adjuvant-free compositions disclosed herein may provide protective immune responses when administered as a single dose. Alum-free compositions that induce robust immune responses are especially useful in adults about 60 and older.

### Aluminum-Based Adjuvants

[0295] In embodiments, the adjuvant may be alum (e.g. AlPO4 or Al(OH)₃). In embodiments, the nanoparticle is substantially bound to the alum. In embodiments, the nanoparticle may be at least 80% bound, at least 85% bound, at least 90% bound or at least 95% bound to the alum. In embodiments, the nanoparticle is 92% to 97% bound to the alum in a composition. The amount of alum is present per dose is typically in a range between about 400 μg to about 1250 μg. For example, the alum may be present in a per dose amount of about 300 μg to about 900 μg, about 400 μg to about 800 μg, about 500 μg to about 700 μg, about 400 μg to about 600 μg, or about 400 μg to about 500 μg. Typically, the alum is present at about 400 μg for a dose of 120 μg of the protein nanoparticle.

### Saponin Adjuvants

[0296] Adjuvants containing saponin may also be combined with the immunogens disclosed herein. Saponins are glycosides derived from the bark of the Quillaja saponaria Molina tree. Typically, saponin is prepared using a multi-step purification process resulting in multiple fractions. As used, herein, the term “a saponin fraction from Quillaja saponaria Molina” is used generically to describe a semi-purified or defined saponin fraction of Quillaja saponaria or a substantially pure fraction thereof.

### Saponin Fractions

[0297] Several approaches for producing saponin fractions are suitable. Fractions A, B, and C are described in U.S. Pat. No. 6,352,697 and may be prepared as follows. A lipophilic fraction from Quil A, a crude aqueous Quillaja saponaria Molina extract, is separated by chromatography and eluted with 70% acetonitrile in water to recover the lipophilic fraction. This lipophilic fraction is then separated by semi-preparative HPLC with elution using a gradient of from 25% to 60% acetonitrile in acidic water. The fraction referred to herein as “Fraction A” or “QH-A” is, or corresponds to, the fraction, which is eluted at approximately 39% acetonitrile. The fraction referred to herein as “Fraction B” or “QH-B” is, or corresponds to, the fraction, which is eluted at approximately 47% acetonitrile. The fraction referred to herein as “Fraction C” or “QH-C” is, or corresponds to, the fraction, which is eluted at approximately 49% acetonitrile. Additional information regarding purification of Fractions is found in U.S. Pat. No. 5,057,540. When prepared as described herein, Fractions A, B and C of Quillaja saponaria Molina each represent groups or families of chemically closely related molecules with definable properties. The chromatographic conditions under which they are obtained are such that the batch-to-batch reproducibility in terms of elution profile and biological activity is highly consistent.

[0298] Other saponin fractions have been described. Fractions B3, B4 and B4b are described in EP 0436620. Fractions QA1-QA22 are described EP03632279 B2, Q-VAC (Nor-Feed, AS Denmark), Quillaja saponaria Molina Spikoside (Isconova AB, Ultunaallén 2B, 756 51 Uppsala, Sweden). Fractions QA-1, QA-2, QA-3, QA-4, QA-5, QA-6, QA-7, QA-8, QA-9, QA-10, QA-11, QA-12, QA-13, QA-14, QA-15, QA-16, QA-17, QA-18, QA-19, QA-20, QA-21, and QA-22 of EP 0 3632 279 B2, especially QA-7, QA-17, QA-18, and QA-21 may be used. They are obtained as described in EP 0 3632 279 B2, especially at page 6 and in Example 1 on page 8 and 9.

[0299] The saponin fractions described herein and used for forming adjuvants are often substantially pure fractions; that is, the fractions are substantially free of the presence of contamination from other materials. In particular aspects, a substantially pure saponin fraction may contain up to 40% by weight, up to 30% by weight, up to 25% by weight, up to 20% by weight, up to 15% by weight, up to 10% by weight, up to 7% by weight, up to 5% by weight, up to 2% by weight, up to 1% by weight, up to 0.5% by weight, or up to 0.1% by weight of other compounds such as other saponins or other adjuvant materials.

### ISCOM Structures

[0300] Saponin fractions may be administered in the form of a cage-like particle referred to as an ISCOM (Immune Stimulating COMplex). ISCOMs may be prepared as described in EP0109942B1, EP0242380B 1 and EP0180546 B1. In embodiments, a transport and/or a passenger antigen may be used, as described in EP 9600647-3 (PCT/SE97/00289).

### Matrix Adjuvants

[0301] In embodiments, the ISCOM is an ISCOM matrix complex. An ISCOM matrix complex comprises at least one saponin fraction and a lipid. The lipid is at least a sterol, such as cholesterol. In embodiments, the ISCOM matrix complex also contains a phospholipid. The ISCOM matrix complexes may also contain one or more other immunomodulatory (adjuvant-active) substances, not necessarily a glycoside, and may be produced as described in EP0436620B1, which is incorporated by reference in its entirety herein.

[0302] In other aspects, the ISCOM is an ISCOM complex. An ISCOM complex contains at least one saponin, at least one lipid, and at least one kind of antigen or epitope. The ISCOM complex contains antigen associated by detergent treatment such that that a portion of the antigen integrates into the particle. In contrast, ISCOM matrix is formulated as an admixture with antigen and the association between ISCOM matrix particles and antigen is mediated by electrostatic and/or hydrophobic interactions.

[0303] In embodiments, the saponin fraction is integrated into an ISCOM matrix complex or an ISCOM complex, or at least one additional adjuvant, which also is integrated into the ISCOM or ISCOM matrix complex or mixed therewith, is selected from fraction A, fraction B, or fraction C of Quillaja saponaria, a semipurified preparation of Quillaja saponaria, a purified preparation of Quillaja saponaria, or any purified sub-fraction e.g., QA 1-21.

[0304] In particular aspects, each ISCOM particle may contain at least two saponin fractions. Any combinations of weight % of different saponin fractions may be used. Any combination of weight % of any two fractions may be used. For example, the particle may contain any weight % of fraction A and any weight % of another saponin fraction, such as a crude saponin fraction or fraction C, respectively. Accordingly, in particular aspects, each ISCOM matrix particle or each ISCOM complex particle may contain from 0.1 to 99.9 by weight, 5 to 95% by weight, 10 to 90% by weight 15 to 85% by weight, 20 to 80% by weight, 25 to 75% by weight, 30 to 70% by weight, 35 to 65% by weight, 40 to 60% by weight, 45 to 55% by weight, 40 to 60% by weight, or 50% by weight of one saponin fraction, e.g. fraction A and the rest up to 100% in each case of another saponin e.g. any crude fraction or any other faction e.g. fraction C. The weight is calculated as the total weight of the saponin fractions. Examples of ISCOM matrix complex and ISCOM complex adjuvants are disclosed in U.S Published Application No. 2013/0129770, which is incorporated by reference in its entirety herein.

[0305] In embodiments, the ISCOM matrix or ISCOM complex comprises from 5-99% by weight of one fraction, e.g. fraction A and the rest up to 100% of weight of another fraction e.g. a crude saponin fraction or fraction C. The weight is calculated as the total weight of the saponin fractions.

[0306] In embodiment, the ISCOM matrix or ISCOM complex comprises from 40% to 99% by weight of one fraction, e.g. fraction A and from 1% to 60% by weight of another fraction, e.g. a crude saponin fraction or fraction C. The weight is calculated as the total weight of the saponin fractions.

[0307] In embodiments, the ISCOM matrix or ISCOM complex comprises from 70% to 95% by weight of one fraction e.g., fraction A, and from 30% to 5% by weight of another fraction, e.g., a crude saponin fraction, or fraction C. The weight is calculated as the total weight of the saponin fractions. In other embodiments, the saponin fraction from Quillaja saponaria Molina is selected from any one of QA 1-21.

[0308] In addition to particles containing mixtures of saponin fractions, ISCOM matrix particles and ISCOM complex particles may each be formed using only one saponin fraction. Compositions disclosed herein may contain multiple particles wherein each particle contains only one saponin fraction. That is, certain compositions may contain one or more different types of ISCOM-matrix complexes particles and/or one or more different types of ISCOM complexes particles, where each individual particle contains one saponin fraction from Quillaja saponaria Molina, wherein the saponin fraction in one complex is different from the saponin fraction in the other complex particles.

[0309] In embodiments, one type of saponin fraction or a crude saponin fraction may be integrated into one ISCOM matrix complex or particle and another type of substantially pure saponin fraction, or a crude saponin fraction, may be integrated into another ISCOM matrix complex or particle. A composition or vaccine may comprise at least two types of complexes or particles each type having one type of saponins integrated into physically different particles.

[0310] In the compositions, mixtures of ISCOM matrix complex particles and/or ISCOM complex particles may be used in which one saponin fraction Quillaja saponaria Molina and another saponin fraction Quillaja saponaria Molina are separately incorporated into different ISCOM matrix complex particles and/or ISCOM complex particles.

[0311] The ISCOM matrix or ISCOM complex particles, which each have one saponin fraction, may be present in composition at any combination of weight %. In particular aspects, a composition may contain 0.1% to 99.9% by weight, 5% to 95% by weight, 10% to 90% by weight, 15% to 85% by weight, 20% to 80% by weight, 25% to 75% by weight, 30% to 70% by weight, 35% to 65% by weight, 40% to 60% by weight, 45% to 55% by weight, 40 to 60% by weight, or 50% by weight, of an ISCOM matrix or complex containing a first saponin fraction with the remaining portion made up by an ISCOM matrix or complex containing a different saponin fraction. In aspects, the remaining portion is one or more ISCOM matrix or complexes where each matrix or complex particle contains only one saponin fraction. In other aspects, the ISCOM matrix or complex particles may contain more than one saponin fraction.

[0312] In particular compositions, the only saponin fraction in a first ISCOM matrix or ISCOM complex particle is Fraction A and the only saponin fraction in a second ISCOM matrix or ISCOM complex particle is Fraction C.

[0313] In embodiments, the Fraction A of Quillaja Saponaria Molina accounts for at least about 80%, 81%, 82%, 83%, 84%, 85%, 86%, 87%, 88%, 89%, 90%, 91%, 92%, 93%, 94%, 95%, 96%, 97%, 98%, or 99% by weight, and fraction C of Quillaja Saponaria Molina accounts for the remainder, respectively, of the sum of the weights of fraction A of Quillaja Saponaria Molina and fraction C of Quillaja Saponaria Molina in the adjuvant.

[0314] Preferred compositions comprise a first ISCOM matrix containing Fraction A and a second ISCOM matrix containing Fraction C, wherein the Fraction A ISCOM matrix constitutes about 70% per weight of the total saponin adjuvant, and the Fraction C ISCOM matrix constitutes about 30% per weight of the total saponin adjuvant. In another preferred composition, the Fraction A ISCOM matrix constitutes about 85% per weight of the total saponin adjuvant, and the Fraction C ISCOM matrix constitutes about 15% per weight of the total saponin adjuvant. In another preferred composition, the Fraction A ISCOM matrix constitutes about 92% per weight of the total saponin adjuvant, and the Fraction C ISCOM matrix constitutes about 8% per weight of the total saponin adjuvant. Thus, in certain compositions, the Fraction A ISCOM matrix is present in a range of about 70% to about 85%, and Fraction C ISCOM matrix is present in a range of about 15% to about 30%, of the total weight amount of saponin adjuvant in the composition. In certain compositions, the Fraction A ISCOM matrix is present in a range of about 70% to about 92%, and Fraction C ISCOM matrix is present in a range of about 8% to about 30%, of the total weight amount of saponin adjuvant in the composition. In embodiments, the Fraction A ISCOM matrix accounts for 50-96% by weight and Fraction C ISCOM matrix accounts for the remainder, respectively, of the sums of the weights of Fraction A ISCOM matrix and Fraction C ISCOM in the adjuvant. In a particularly preferred composition, referred to herein as MATRIX-MTM, the Fraction A ISCOM matrix is present at about 85% and Fraction C ISCOM matrix is present at about 15% of the total weight amount of saponin adjuvant in the composition. MATRIX-MTM may be referred to interchangeably as Matrix-M1.

[0315] Exemplary QS-7 and QS-21 fractions, their production and their use is described in U.S. Pat. Nos. 5,057,540; 6,231,859; 6,352,697; 6,524,584; 6,846,489; 7,776,343, and 8,173,141, which are incorporated by reference herein.

[0316] In embodiments, other adjuvants may be used in addition or as an alternative. The inclusion of any adjuvant described in Vogel et al., “A Compendium of Vaccine Adjuvants and Excipients (2nd Edition),” herein incorporated by reference in its entirety for all purposes, is envisioned within the scope of this disclosure. Other adjuvants include complete Freund's adjuvant (a non-specific stimulator of the immune response containing killed Mycobacterium tuberculosis), incomplete Freund's adjuvants and aluminum hydroxide adjuvant. Other adjuvants comprise GMCSP, BCG, MDP compounds, such as thur-MDP and nor-MDP, CGP (MTP-PE), lipid A, and monophosphoryl lipid A (MPL), MF-59, RIBI, which contains three components extracted from bacteria, MPL, trehalose dimycolate (TDM) and cell wall skeleton (CWS) in a 2% squalenc/TWEEN® polysorbate 80 emulsion. In embodiments, the adjuvant may be a paucilamellar lipid vesicle; for example, NOVASOMES®. NOVASOMES® are paucilamellar nonphospholipid vesicles ranging from about 100 nm to about 500 nm. They comprise BRIJ® alcohol ethoxylate 72, cholesterol, oleic acid and squalene. NOVASOMES® have been shown to be an effective adjuvant (see, U.S. Pat. Nos. 5,629,021, 6,387,373, and 4,911,928.

### Administration and Dosage

[0317] In embodiments, the disclosure provides a method for eliciting an immune response against one or more coronaviruses. In embodiments, the response is against one or more of the SARS-CoV-2 virus, MERS, and SARS. In embodiments, the response is against a heterogeneous SARS-CoV-2 strain. In embodiments, the heterogeneous SARS-COV-2 strain has a World Health Organization Label of alpha, beta, gamma, delta, epsilon, eta, iota, kappa, zeta, mu, or omicron. In embodiments, the heterogeneous SARS-COV-2 strain has a PANGO lineage selected from the group consisting of B.1.1.529; BA.1, BA.1.1, BA.2, BA.3, BA.4, BA.5, B.1.1.7, B.1.351, P.1, B.1.617.2, AY, B.1.427, B.1.429, B.1.525, B.1.526, B.1.617.1, B.1.617.3, P.2, B.1.621, or B.1.621.1. The method involves administering an immunologically effective amount of a composition containing a nanoparticle or containing a recombinant CoV Spike(S) polypeptide to a subject. Advantageously, the proteins disclosed herein induce one or more of particularly useful anti-coronavirus responses.

[0318] In embodiments, the nanoparticles or CoV S polypeptides are administered with an adjuvant. In aspects, the nanoparticles or CoV S polypeptides are administered without an adjuvant. In aspects, the adjuvant may be bound to the nanoparticle, such as by a non-covalent interaction. In other aspects, the adjuvant is co-administered with the nanoparticle but the adjuvant and nanoparticle do not interact substantially.

[0319] In embodiments, the nanoparticles or CoV S polypeptides may be used for the prevention and/or treatment of one or more of a SARS-COV-2 infection, a heterogeneous SARS-COV-2 strain infection, a SARS infection, or a MERS infection. Thus, the disclosure provides a method for eliciting an immune response against one or more of the SARS-COV-2 virus, heterogeneous SARS-COV-2 virus, MERS, and SARS. The method involves administering an immunologically effective amount of a composition containing a nanoparticle or a CoV S polypeptide to a subject. Advantageously, the proteins disclosed herein induce particularly useful anti-coronavirus responses.

[0320] In embodiments, the nanoparticles or CoV S polypeptides described herein have an efficacy against a SARS-COV-2 virus or a heterogeneous SARS-COV-2 strain that is between about 50% and about 99%, between about 80% and about 99%, between about 75% and about 99%, between about 80% and about 95%, between about 90% and about 98%, between about 75% and about 95%, at least about 50%, at least about 55%, at least about 60%, at least about 65%, at least about 70%, at least about 75%, at least about 80%, at least about 85%, at least about 90%, at least about 91%, at least about 92%, at least about 93%, at least about 94%, at least about 95%, at least about 96%, at least about 97%, at least about 98%, or at least about 99%.

[0321] Compositions disclosed herein may be administered via a systemic route or a mucosal route or a transdermal route or directly into a specific tissue. As used herein, the term “systemic administration” includes parenteral routes of administration. In particular, parenteral administration includes subcutaneous, intraperitoneal, intravenous, intraarterial, intramuscular, or intrasternal injection, intravenous, or kidney dialytic infusion techniques. Typically, the systemic, parenteral administration is intramuscular injection. As used herein, the term “mucosal administration” includes oral, intranasal, intravaginal, intra-rectal, intra-tracheal, intestinal and ophthalmic administration. Preferably, administration is intramuscular.

[0322] Compositions may be administered on a single dose schedule or a multiple dose schedule. Multiple doses may be used in a primary immunization schedule or in a booster immunization schedule. In embodiments, about 1, 2, 3, 4, 5, 6, 7, 8, 9, 10, 11, 12, 13, 14, 15, 16, 17, 18, 19, 20, 21, 22, 23, 24, 25, 26, 27, 28, 29, or 30 doses are administered. In a multiple dose schedule the various doses may be given by the same or different routes e.g., a parenteral prime and mucosal boost, a mucosal prime and parenteral boost, etc. In aspects, a boost dose is administered about 2 weeks, about 3 weeks, about 4 weeks, about 5 weeks, about 6 weeks, about 2 months, about 3 months, about 4 months, about 5 months, about 6 months, about 7 months, about 8 months, about 9 months, about 10 months, about 11 months, about 12 months (1 year), about 2 years, about 3 years, about 4 years, about 5 years, about 6 years, about 7 years, about 8 years, about 9 years, or about 10 years after the first dose. In embodiments, a boost dose is administered every year after administration of the initial dose. In embodiments, the follow-on boost dose is administered 3 weeks or 4 weeks after administration of the prior dose. In embodiments, the first dose is administered at day 0, and the boost dose is administered at day 21. In embodiments, the first dose is administered at day 0, and the boost dose is administered at day 28. In embodiments, the first dose is administered at day 0, a boost dose is administered at day 21, and a second boost dose is administered about six months after administration of the first dose or second dose. In embodiments, the first dose is administered at day 0, and the boost dose is administered at day 28, and a second boost dose is administered about six months after administration of the first dose. In embodiments, the first dose is administered at day 0, a boost dose is administered at day 21, and a second boost dose is administered about six months after administration of the second dose. In embodiments, the first dose is administered at day 0, and the boost dose is administered at day 28, and a second boost dose is administered about six months after administration of the second dose.

[0323] In embodiments, the first dose is administered at day 0, a boost dose is administered at day 21, and a second boost dose is administered about 1 year after administration of the first dose or the first boost dose. In embodiments, the first dose is administered at day 0, a first boost dose is administered at day 28, and a second boost dose is administered about 1 year after administration of the first dose. In embodiments, the first dose is administered at day 0, a boost dose is administered at day 21, and a second boost dose is administered about 1 year after administration of the second dose. In embodiments, the first dose is administered at day 0, a first boost dose is administered at day 28, and a second boost dose is administered about 1 year after administration of the second dose. In embodiments, the second boost dose is administered from 6 months to 24 months or from 12 to 24 months after the first boost dose.

[0324] In embodiments, the boost dose comprises the same immunological composition as the initial dose. In embodiments, the boost dose comprises a different immunological composition than the initial dose. In embodiments, the different immunological composition is a SARS-COV-2 Spike glycoprotein, an mRNA encoding a SARS-Cov-2 Spike glycoprotein, a plasmid DNA encoding a SARS-Cov-2 Spike glycoprotein, an viral vector encoding a SARS-Cov-2 Spike glycoprotein, or an inactivated SARS-COV-2 virus. In embodiments, the boost dose comprises the initial composition. In embodiments, the initial dose comprises a SARS-COV-2 S glycoprotein (e.g., a SARS COV-2 S glycoprotein having the amino acid sequence of SEQ ID NO: 87), and the boost dose comprises the same SARS-COV-2 S glycoprotein (e.g., a SARS COV-2 S glycoprotein having the amino acid sequence of SEQ ID NO: 87). In embodiments, the initial dose comprises a SARS-COV-2 S glycoprotein (e.g., a SARS COV-2 S glycoprotein having the amino acid sequence of SEQ ID NO: 87), and the boost dose comprises a different SARS-COV-2 S glycoprotein (e.g., a SARS COV-2 S glycoprotein having the amino acid sequence of SEQ ID NO: 132).

[0325] In embodiments, the initial dose comprises a combination of SARS-COV-2 S glycoproteins (e.g., a SARS COV-2 S glycoprotein having the amino acid sequence of SEQ ID NO: 87 and a SARS COV-2 S glycoprotein having the amino acid sequence of SEQ ID NO: 132). In embodiments, the boost dose comprises a combination of SARS-COV-2 S glycoproteins (e.g., a SARS COV-2 S glycoprotein having the amino acid sequence of SEQ ID NO: 87 and a SARS CoV-2 S glycoprotein having the amino acid sequence of SEQ ID NO: 132). In embodiments, the initial dose comprises a SARS-COV-2 S glycoprotein, a plasmid DNA encoding a SARS-Cov-2 S glycoprotein, an viral vector encoding a SARS-COV-2 Spike glycoprotein, or an inactivated SARS-COV-2 virus. In embodiments, the initial dose comprises a SARS-COV-2 Spike glycoprotein, a plasmid DNA encoding a SARS-COV-2 Spike glycoprotein, an viral vector encoding a SARS-Cov-2 Spike glycoprotein, or an inactivated SARS-COV-2 virus, and the boost dose comprises one or more SARS-COV-2 S glycoproteins.

[0326] In embodiments, the dose, as measured in ug, may be the total weight of the dose including the solute, or the weight of the CoV S polypeptide nanoparticles, or the weight of the CoV S polypeptide. Dose is measured using protein concentration assay either A280 or ELISA.

[0327] The dose of antigen, including for pediatric administration, may be in the range of about 5 μg to about 25 μg, about 1 μg to about 300 μg, about 90 μg to about 270 μg, about 100 μg to about 160 μg, about 110 μg to about 150 μg, about 120 μg to about 140 μg, or about 140 μg to about 160 μg. In embodiments, the dose is about 120 μg, administered with alum. In aspects, a pediatric dose may be in the range of about 1 μg to about 90 μg. In embodiments, the dose of CoV Spike(S) polypeptide is about 1 μg, about 2 μg, about 3 μg, about 4 μg, about 5 μg, about 6 μg, about 7 μg, about 8 μg, about 9 μg, about 10 μg, about 11 μg, about 12 μg, about 13 μg, about 14 μg, about 15 μg, about 16 μg, about 17 μg, about 18 μg, about 19 μg, about 20 μg, about 21, about 22, about 23, about 24, about 25 μg, about 26 μg, about 27 μg, about 28 μg, about 29 μg, about 30 μg, about 40 μg, about 50, about 60, about 70, about 80, about 90 about 100 μg, about 110 μg, about 120 μg, about 130 μg, about 140 μg, about 150 μg, about 160 μg, about 170 μg, about 180 μg, about 190 μg, about 200 μg, about 210 μg, about 220 μg, about 230 μg, about 240 μg, about 250 μg, about 260 μg, about 270 μg, about 280 μg, about 290 μg, or about 300 μg, including all values and ranges in between. In embodiments, the dose of CoV S polypeptide is 5 μg. In embodiments, the dose of CoV S polypeptide is 25 μg. In embodiments, the dose of a CoV S polypeptide is the same for the initial dose and for boost doses. In embodiments, the dose of a CoV S polypeptide is the different for the initial dose and for boost doses.

[0328] In embodiments, the amount of first CoV S glycoprotein in the composition ranges from about 1 μg to about 100 μg. In embodiments, the amount of second, third, fourth, and fifth CoV S glycoproteins is less than the amount of first CoV S glycoprotein in the composition. In embodiments, the immunogenic composition comprises from about 1 ng to about 5 μg of a second CoV S glycoprotein in the immunogenic composition. In embodiments, the immunogenic composition comprises from about 1 ng to about 5 μg of a third CoV S glycoprotein in the immunogenic composition. In embodiments, the immunogenic composition comprises from about 1 ng to about 5 μg of a fourth CoV S glycoprotein in the immunogenic composition. In embodiments, the immunogenic composition comprises from about 1 ng to about 5 μg of a fifth CoV S glycoprotein in the immunogenic composition. In embodiments, the total amount of CoV S glycoprotein in the immunogenic composition is greater than I ug and less than about 5 μg, less than about 10 μg, less than about 15 μg, less than about 20 μg, or less than about 25 μg.

[0329] Certain populations may be administered with or without adjuvants. In certain aspects, compositions may be free of added adjuvant. In such circumstances, the dose may be increased by about 10%.

[0330] In embodiments, the immunogenic compositions described herein are provided in pre-filled syringes. When the immunogenic composition is prepared in a pre-filled syringe, the CoV S polypeptides and adjuvant are combined in advance of administration.

[0331] In embodiments, the dose of the adjuvant administered with a CoV S polypeptide, including naturally and non-naturally occurring polypeptides, is from about 1 μg to about 100 μg, for example, about 1 μg, about 2 μg, about 3 μg, about 4 μg, about 5 μg, about 6 μg, about 7 μg, about 8 μg, about 9 μg, about 10 μg, about 11 μg, about 12 μg, about 13 μg, about 14 μg, about 15 μg, about 16 μg, about 17 μg, about 18 μg, about 19 μg, about 20 μg, about 21, about 22, about 23, about 24, about 25 μg, about 26 μg, about 27 μg, about 28 μg, about 29 μg, about 30 μg, about 31 μg, about 32 μg, about 33 μg, about 34 μg, about 35 μg, about 36 μg, about 37 μg, about 38 μg, about 39 μg, about 40 μg, about 41 μg, about 42 μg, about 43 μg, about 44 μg, about 45 μg, about 46 μg, about 47 μg, about 48 μg, about 49 μg, about 50 μg, about 51 μg, about 52 μg, about 53 μg, about 54 μg, about 55 μg, about 56 μg, about 57 μg, about 58 μg, about 59 μg, about 60 μg, about 61 μg, about 62 μg, about 63 μg, about 64 μg, about 65 μg, about 66 μg, about 67 μg, about 68 μg, about 69 μg, about 70 μg, about 71 μg, about 72 μg, about 73 μg, about 74 μg, about 75 μg, about 76 μg, about 77 μg, about 78 μg, about 79 μg, about 80 μg, about 81 μg, about 82 μg, about 83 μg, about 84 μg, about 85 μg, about 86 μg, about 87 μg, about 88 μg, about 89 μg, about 90 μg, about 91 μg, about 92 μg, about 93 μg, about 94 μg, about 95 μg, about 96 μg, about 97 μg, about 98 μg, about 99 μg, or about 100 μg of adjuvant. In embodiments, the dose of adjuvant is about 50 μg. In embodiments, the adjuvant is a saponin adjuvant, e.g., MATRIX-M™

[0332] In embodiments, the dose is administered in a volume of about 0.1 mL to about 1.5 mL, for example, about 0.1 mL, about 0.2 mL, about 0.25 mL, about 0.3 mL, about 0.4 mL, about 0.5 mL, about 0.6 mL, about 0.7 mL, about 0.8 mL, about 0.9 mL, about 1.0 mL, about 1.1 mL, about 1.2 mL, about 1.3 mL, about 1.4 mL, or about 1.5 mL. In embodiments, the dose is administered in a volume of 0.25 mL. In embodiments, the dose is administered in a volume of 0.5 mL. In embodiments, the dose is administered in a volume of 0.6 mL.

[0333] In particular embodiments for a vaccine against MERS, SARS, or the SARS-COV-2 coronavirus, the dose may comprise a CoV S polypeptide concentration of about 1 μg/mL to about 50 μg/mL, 10 μg/mL to about 100 μg/mL, about 10 μg/mL to about 50 μg/mL, about 175 μg/mL to about 325 μg/mL, about 200 μg/mL to about 300 μg/mL, about 220 μg/mL to about 280 μg/mL, or about 240 μg/mL to about 260 μg/mL.

[0334] In another embodiment, the disclosure provides a method of formulating a vaccine composition that induces immunity to an infection or at least one disease symptom thereof to a mammal, comprising adding to the composition an effective dose of a nanoparticle or a CoV S polypeptide. The disclosed CoV S polypeptides and nanoparticles are useful for preparing compositions that stimulate an immune response that confers immunity or substantial immunity to infectious agents. Thus, in one embodiment, the disclosure provides a method of inducing immunity to infections or at least one disease symptom thereof in a subject, comprising administering at least one effective dose of a nanoparticle and/or a CoV S polypeptide.

[0335] In embodiments, the CoV S polypeptides or nanoparticles comprising the same are administered in combination with an additional immunogenic composition. In embodiments, the additional immunogenic composition induces an immune response against SARS-COV-2. In embodiments, the additional immunogenic composition is administered within about 1 minute, about 5 minutes, about 10 minutes, about 20 minutes, about 30 minutes, about 40 minutes, about 50 minutes, about 1 hour, about 2 hours, about 3 hours, about 4 hours, about 5 hours, about 6 hours, about 7 hours, about 8 hours, about 9 hours, about 10 hours, about 11 hours, about 12 hours, about 13 hours, about 14 hours, about 15 hours, about 16 hours, about 17 hours, about 18 hours, about 19 hours, about 20 hours, about 21 hours, about 22 hours, about 23 hours, about 1 day, about 2 days, about 3 days, about 4 days, about 5 days, about 6 days, about 7 days, about 8 days, about 9 days, about 10 days, about 11 days, about 12 days, about 13 days, about 14 days, about 15 days, about 16 days, about 17 days, about 18 days, about 19 days, about 20 days, about 21 days, about 22 days, about 23 days, about 24 days, about 25 days, about 26 days, about 27 days, about 28 days, about 29 days, about 30 days, or about 31 days of the disclosed CoV S polypeptides or nanoparticles comprising the same. In embodiments, the additional composition is administered with a first dose of a composition comprising a CoV S polypeptide or nanoparticle comprising the same. In embodiments, the additional composition is administered with a boost dose of a composition comprising a CoV S polypeptide or nanoparticle comprising the same.

[0336] In embodiments, the additional immunogenic composition comprises an mRNA encoding a SARS-Cov-2 Spike glycoprotein, a plasmid DNA encoding a SARS-Cov-2 Spike glycoprotein, an viral vector encoding a SARS-Cov-2 Spike glycoprotein, or an inactivated SARS-COV-2 virus.

[0337] In embodiments, the additional immunogenic composition comprises mRNA that encodes for a CoV S polypeptide. In embodiments, the mRNA encodes for a CoV S polypeptide comprising proline substitutions at positions 986 and 987 of SEQ ID NO: 1. In embodiments, the mRNA encodes for a CoV S polypeptide comprising an intact furin cleavage site. In embodiments, the mRNA encodes for a CoV S polypeptide comprising proline substitutions at positions 986 and 987 of SEQ ID NO: 1 and an intact furin cleavage site. In embodiments, the mRNA encodes for a CoV S polypeptide comprising proline substitutions at positions 986 and 987 of SEQ ID NO: 1 and an inactive furin cleavage site. In embodiments, the mRNA encodes for a CoV S polypeptide having an amino acid sequence of SEQ ID NO: 87. In embodiments, the mRNA encoding for a CoV S polypeptide is encapsulated in a lipid nanoparticle. An exemplary immunogenic composition comprising mRNA that encodes for a CoV S polypeptide is described in Jackson et al. N. Eng. J. Med. 2020. An mRNA Vaccine against SARS-COV-2-preliminary report, which is incorporated by reference in its entirety herein. In embodiments, the composition comprising mRNA that encodes for a CoV S polypeptide is administered at a dose of 25 μg, 100 μg, or 250 μg.

[0338] In embodiments, the additional immunogenic composition comprises an adenovirus vector encoding for a CoV S polypeptide. In embodiments, the AAV vector encodes for a wild-type CoV S polypeptide. In embodiments, the AAV vector encodes for a CoV S polypeptide comprising proline substitutions at positions 986 and 987 of SEQ ID NO: 1 and an intact furin cleavage site. In embodiments, the AAV vector encodes for a CoV S polypeptide comprising proline substitutions at positions 986 and 987 of SEQ ID NO: 1 and an inactive furin cleavage site. In embodiments, the AAV vector encodes for a CoV S polypeptide having an amino acid sequence of SEQ ID NO: 87. The following publications describe immunogenic compositions comprising an adenovirus vector encoding for a CoV S polypeptide, each of which is incorporated by reference in its entirety herein: van Doremalen N. et al. A single dose of ChAdOx1 MERS provides protective immunity in rhesus macaques. Science Advances, 2020; van Doremalen N. et al. ChAdOx1 nCOV-19 vaccination prevents SARS-COV-2 pneumonia in rhesus macaques. bioRxiv, (2020).

[0339] In embodiments, the additional immunogenic composition comprises deoxyribonucleic acid (DNA). In embodiments, the additional immunogenic composition comprises plasmid DNA. In embodiments, the plasmid DNA encodes for a CoV S polypeptide. In embodiments, the DNA encodes for a CoV S polypeptide comprising proline substitutions at positions 986 and 987 of SEQ ID NO: 1 and an intact furin cleavage site. In embodiments, the DNA encodes for a CoV S polypeptide comprising proline substitutions at positions 986 and 987 of SEQ ID NO: 1 and an inactive furin cleavage site. In embodiments, the DNA encodes for a CoV S polypeptide having an amino acid sequence of SEQ ID NO: 87. In embodiments, the DNA encodes for a CoV S polypeptide having an amino acid sequence of SEQ ID NO: 174 or SEQ ID NO: 175.

[0340] In embodiments, the additional immunogenic composition comprises an inactivated virus vaccine.

[0341] In embodiments, the CoV S polypeptides or nanoparticles comprising CoV S polypeptides are administered to a patient that has or has previously had a confirmed infection caused by SARS-CoV-2 or a heterogeneous SARS-COV-2 strain. The infection with SARS-COV-2 or a heterogeneous SARS-COV-2 strain may be confirmed by a nucleic acid amplification test (e.g., polymerase chain reaction) or serological testing (e.g., testing for antibodies against a SARS-COV-2 viral antigen). In embodiments, the CoV S polypeptides or nanoparticles comprising CoV S polypeptides are administered to a patient at least about 3 days, at least about 1 week, at least about 2 weeks, at least about 3 weeks, at least about 4 weeks after a patient has been diagnosed with COVID-19. In embodiments, the CoV S polypeptides or nanoparticles comprising CoV S polypeptides are administered to a patient between 1 week and 1 year after the patient's diagnosis with COVID-19, for example, about 1 week, about 2 weeks, about 3 weeks, about 4 weeks, about 5 weeks, about 6 weeks, about 1 month, about 2 months, about 3 months, about 4 months, about 5 months, about 6 months, about 7 months, about 8 months, about 9 months, about 10 months, about 11 months, or about 1 year. In embodiments, the CoV S polypeptides or nanoparticles comprising CoV S polypeptides are administered to a patient between I week and 20 years after the patient's diagnosis with COVID-19, for example, about 1 week, about 2 weeks, about 3 weeks, about 4 weeks, about 5 weeks, about 6 weeks, about 1 month, about 2 months, about 3 months, about 4 months, about 5 months, about 6 months, about 7 months, about 8 months, about 9 months, about 10 months, about 11 months, about 1 year, about 2 years, about 3 years, about 4 years, about 5 years, about 6 years, about 7 years, about 8 years, about 9 years, about 10 years, about 11 years, about 12 years, about 13 years, about 14 years, about 15 years, about 16 years, about 17 years, about 18 years, about 19 years, or about 20 years.

[0342] In embodiments, the CoV S polypeptides or nanoparticles comprising the same are administered after the patient has been administered a first immunogenic composition. Non-limiting examples of first immunogenic compositions include a SARS-COV-2 Spike glycoprotein, an mRNA encoding a SARS-Cov-2 Spike glycoprotein, a plasmid DNA encoding a SARS-Cov-2 Spike glycoprotein, an viral vector encoding a SARS-Cov-2 Spike glycoprotein, or an inactivated SARS-COV-2 virus. In embodiments, the CoV S polypeptides or nanoparticles comprising the same are administered between about 1 week and about 1 year, between about I week and 1 month, between about 3 weeks and 4 weeks, between about 1 week and 5 years, between about 1 year and about 5 years, between about 1 year and about 3 years, between about 3 years and about 5 years, between about 5 years and about 10 years, between about 1 year and about 10 years, or between about 1 year and about 2 years after administration of the first immunogenic composition. In embodiments, the CoV S polypeptides or nanoparticles comprising the same are administered between about 1 week and about 1 year after administration of the first immunogenic composition, for example, about 1 week, about 2 weeks, about 3 weeks, about 4 weeks, about 5 weeks, about 6 weeks, about 7 weeks, about 8 weeks, about 9 weeks, about 10 weeks, about 1 month, about 2 months, about 3 months, about 4 months, about 5 months, about 6 months, about 7 months, about 8 months, about 9 months, about 10 months, about 11 months, or about 1 year after administration of the first immunogenic composition.

[0343] In embodiments, the CoV S proteins or nanoparticles comprising CoV S proteins are useful for preparing immunogenic compositions to stimulate an immune response that confers immunity or substantial immunity to one or more of MERS, SARS, SARS-COV-2, and a heterogeneous SARS-COV-2 strain. Both mucosal and cellular immunity may contribute to immunity to infection and disease. Antibodies secreted locally in the upper respiratory tract are a major factor in resistance to natural infection. Secretory immunoglobulin A (sIgA) is involved in protection of the upper respiratory tract and serum IgG in protection of the lower respiratory tract. The immune response induced by an infection protects against reinfection with the same virus or an antigenically similar viral strain. The antibodies produced in a host after immunization with the nanoparticles disclosed herein can also be administered to others, thereby providing passive administration in the subject.

[0344] In embodiments, the CoV S proteins or nanoparticles comprising CoV S proteins induce cross-neutralizing antibodies against SARS-COV-2 viruses containing S proteins with one or more modifications selected from: deletion of one or more amino acids selected from the group consisting of amino acid 11-14, 56, 57, 130, 131, 132, 144, 145, 198, 199, 228, 229, 230, 231, 234, 235, 236, 237, 238, 239, 240, 676-685, 676-702, 702-711, 775-793, 806-815 and combinations thereof; (b) mutation of one or more amino acids selected from the group consisting of amino acid 5, 6, 7, 11, 12, 13, 14, 51, 53, 54, 56, 57, 62, 63, 67, 70, 82, 125, 129, 131, 132, 133, 134, 139, 143, 144, 145, 170, 177, 197, 198, 199, 200, 201, 202, 209, 229, 233, 239, 240, 244, 245, 326, 333, 355, 358, 360, 362, 363, 392, 395, 404, 419, 426, 427, 431, 432, 433, 439, 440, 447, 464, 465, 471, 473, 477, 480, 481, 483, 485, 488, 492, 534, 557, 591, 600, 601, 626, 642, 645, 664, 666, 668, 688, 691, 703, 751, 783, 843, 846, 875, 937, 941, 956, 968, 969, 1014, 1058, 1105, 1163, 1186 and combinations thereof; or (c) insertion of a tripeptide having the amino acid sequence of EPE between amino acids 214 and 215; wherein the amino acids of the CoV S glycoprotein are numbered with respect to a polypeptide having the sequence of SEQ ID NO: 2.

[0345] In embodiments, the CoV S proteins or nanoparticles comprising CoV S proteins induce cross-neutralizing antibodies against SARS-COV-2 viruses containing S proteins with one or more modifications selected from: deletions of amino acid 56, deletion of amino acid 57, deletion of amino acid 131, N488Y, A557D, D601G, P668H, T7031, S969A, D1105H, N426K, and Y440F, wherein the amino acids are numbered with respect to a CoV S polypeptide having an amino acid sequence of SEQ ID NO: 2.

[0346] In embodiments, the CoV S protein or nanoparticle comprising a CoV S protein induces cross-neutralizing antibodies against SARS-COV-2 viruses containing S proteins with one or more modifications selected from: deletions of amino acid 56, deletion of amino acid 57, deletion of amino acid 131, N488Y, A557D, D601G, P668H, T7031, S969A, and D1105H, wherein the amino acids are numbered with respect to a CoV S polypeptide having an amino acid sequence of SEQ ID NO: 2

[0347] In embodiments, the CoV S protein or nanoparticle comprising a CoV S protein induces cross-neutralizing antibodies against SARS-COV-2 viruses containing S proteins with one or more modifications selected from: D67A, D202G, L229H, K404N, E471K, N488Y, D601G, and A688V, wherein the amino acids are numbered with respect to a CoV S polypeptide having an amino acid sequence of SEQ ID NO: 2.

[0348] In embodiments, the CoV S protein or nanoparticle comprising a CoV S protein induces cross-neutralizing antibodies against SARS-COV-2 viruses containing S proteins with one or more modifications selected from: deletion of amino acids 229-231, D67A, D202G, K404N, E471K, N488Y, D601G, and A688V, wherein the amino acids are numbered with respect to a CoV S polypeptide having an amino acid sequence of SEQ ID NO: 2.

[0349] In embodiments, the CoV S protein or nanoparticle comprising a CoV S protein induces cross-neutralizing antibodies against SARS-COV-2 viruses containing S proteins with one or more modifications selected from: deletion of amino acids 229-231, L5F, D67A, D202G, K404N, E471K, N488Y, D601G, and A688V wherein the amino acids are numbered with respect to a CoV S polypeptide having an amino acid sequence of SEQ ID NO: 2.

[0350] In embodiments, the CoV S protein or nanoparticle comprising a CoV S protein induces cross-neutralizing antibodies against SARS-COV-2 viruses containing S proteins with one or more modifications selected from: L5F, T7N, P13S, D125Y, R177S, K404T, E471K, N488Y, D601G, H642Y, T1014I, and V1163F, wherein the amino acids are numbered with respect to a CoV S polypeptide having an amino acid sequence of SEQ ID NO: 2.

[0351] In embodiments, the CoV S protein or nanoparticle comprising a CoV S protein induces cross-neutralizing antibodies against SARS-COV-2 viruses with an S protein comprising one or more modifications selected from: W139C and L439R, wherein the amino acids are numbered with respect to a CoV S polypeptide having an amino acid sequence of SEQ ID NO: 2. In embodiments, the CoV S protein comprising W139C and L439R modifications is expressed with a signal peptide having an amino acid sequence of SEQ ID NO: 117 or SEQ ID NO: 5. In embodiments, the CoV S protein or nanoparticle comprising a CoV S protein induces cross-neutralizing antibodies against SARS-COV-2 viruses with one or more modifications selected from: D601G, W139C, and L439R, wherein the amino acids are numbered with respect to a CoV S polypeptide having an amino acid sequence of SEQ ID NO: 2. In embodiments, the CoV S protein or nanoparticle comprising D601G, W139C, and L439R modifications is expressed with a signal peptide having an amino acid sequence of SEQ ID NO: 117 or SEQ ID NO: 5.

[0352] In embodiments, the CoV S protein or nanoparticle comprising a CoV S protein induces cross-neutralizing antibodies against SARS-COV-2 viruses with one or more modifications selected from: D601G, L5F, D67A, D202G, deletions of amino acids 229-231, R233I, K404N, E471K, N488Y, and A688V, wherein the amino acids are numbered with respect to a CoV S polypeptide having an amino acid sequence of SEQ ID NO: 2. In embodiments, the CoV S protein or nanoparticle comprising a CoV S protein induces cross-neutralizing antibodies against SARS-CoV-2 viruses with one or more modifications selected from: L5F, D67A, D202G, deletions of amino acids 229-231, R233I, K404N, E471K, N488Y, and A688V, wherein the amino acids are numbered with respect to a CoV S polypeptide having an amino acid sequence of SEQ ID NO: 2.

[0353] In embodiments, the present disclosure provides a method of producing one or more of high affinity anti-MERS-COV, anti-SARS-COV, and anti-SARS-COV-2 virus antibodies. The high affinity antibodies produced by immunization with the nanoparticles disclosed herein are produced by administering an immunogenic composition comprising an S CoV polypeptide or a nanoparticle comprising an S CoV polypeptide to an animal, collecting the serum and/or plasma from the animal, and purifying the antibody from the serum/and or plasma. In one embodiment, the animal is a human. In embodiments, the animal is a chicken, mouse, guinea pig, rat, rabbit, goat, human, horse, sheep, or cow. In one embodiment, the animal is bovine or equine. In another embodiment, the bovine or equine animal is transgenic. In yet a further embodiment, the transgenic bovine or equine animal produces human antibodies. In embodiments, the animal produces monoclonal antibodies. In embodiments, the animal produces polyclonal antibodies. In one embodiment, the method further comprises administration of an adjuvant or immune stimulating compound. In a further embodiment, the purified high affinity antibody is administered to a human subject. In one embodiment, the human subject is at risk for infection with one or more of MERS, SARS, and SARS-COV-2.

[0354] In embodiments, the CoV S proteins or nanoparticles are co-administered with an influenza glycoprotein or nanoparticle comprising an influenza glycoprotein or a respiratory syncytial virus (RSV) fusion (F) glycoprotein. In embodiments, the CoV S proteins or nanoparticles are co-formulated with RSV F glycoproteins, influenza glycoproteins, or a combination thereof. Suitable glycoproteins and nanoparticles are described in US Publication No. 2018/0133308 and US Publication No. 2019/0314487, each of which is incorporated by reference herein in its entirety. In embodiments, the CoV S protein or nanoparticle is coadministered with: (a) a detergent-core nanoparticle, wherein the detergent-core nanoparticle comprises a recombinant influenza hemagglutinin (HA) glycoprotein from a Type B influenza strain; and (b) a Hemagglutinin Saponin Matrix Nanoparticle (HaSMaN), wherein the HaSMaN comprises a recombinant influenza HA glycoprotein from a Type A influenza strain and ISCOM matrix adjuvant. In embodiments, the CoV S protein or nanoparticle is coadministered with a nanoparticle comprising a non-ionic detergent core and an influenza HA glycoprotein, wherein the influenza HA glycoprotein contains a head region that projects outward from the non-ionic detergent core and a transmembrane domain that is associated with the non-ionic detergent core, wherein the influenza HA glycoprotein is a HA0 glycoprotein, wherein the amino acid sequence of the influenza HA glycoprotein has 100% identity to the amino acid sequence of the native influenza HA protein. In embodiments, the influenza glycoprotein or nanoparticle is coformulated with the CoV S protein or nanoparticle.

[0355] In some embodiments, the disclosure provides co-formulation (i.e., pre-filled syringes or pre-mix) strategies for immunogenic compositions comprising a CoV S glycoprotein and an adjuvant (e.g., a saponin adjuvant). Typical vaccine administration strategies currently being utilized are bedside mix formulations. That is, vaccine compositions and adjuvants are stored separately and are mixed prior to administration. Pre-mix, co-formulation, or pre-filled syringe strategies for vaccine are less common due to the concerns of the stability of the antigens (e.g., a CoV S glycoprotein) and their subsequent immunogenic capabilities. The present disclosure provides immunogenic compositions that can be pre-mixed and stored in advance. The disclosed vaccination strategies and formulations may improve the efficiency of vaccination and may reduce the risks of bedside mixing errors, while maintaining the overall safety and immunogenicity.

[0356] A variety of containers may be used to store and transport the pre-mix formulations, including syringes for single administrations and plastic ampules. In some instances, plastic ampules can be manufactured using the blow-fill-seal manufacturing technique or method. In general, the blow-fill-seal (BFS) manufacturing method includes extruding a plastic material (e.g., resin) to form a parison, which is then placed into a mold and cut to size. A filling needle or mandrel is then used to inflate the plastic, which in turn, results in a hollow ampule that substantially conforms to the shape of the mold. Once inflated, a desired volume of liquid can be injected into the ampule, the filling needle or mandrel can be removed, and the ampule can be sealed. Accordingly, BFS can be an automated process that can be performed in a sterile environment without direct human intervention.

[0357] In some instances, the ability to aseptically manufacture sterile ampules containing a desired liquid can make BFS manufactured ampules particularly well suited for the pharmaceutical industry. BFS technology, however, has not been compatible with all pharmaceutical liquids, products, etc. For example, some known BFS manufacturing methods include delivering the liquid or product into the ampule while the plastic is still relatively hot, which can result in adverse effects to temperature sensitive liquids and/or products such as vaccines, biologics, etc. Advances in cool BFS technology, however, have increased the variety of suitable products, liquids, etc. allowing some vaccines, biologics, and/or other temperature sensitive pharmaceuticals to be contained in BFS ampules.

[0358] In some instances, a BFS ampule can have a size, shape, and/or configuration that is at least partially based on a desired use and/or a desired pharmaceutical liquid or dosage that the ampule is configured to contain. For example, some known BFS ampules can include a pierce through top, a twist-off top, a top including a male or female luer, and/or the like. Some known BFS ampules can have a size and/or shape based on volume of the liquid or dosage configured to be disposed therein. In addition, some known BFS ampules can be manufactured in a strip of multiple, temporarily connected ampules, which can increase manufacturing, packaging, and/or storing efficiencies and/or the like.

[0359] In embodiments, the immunogenic compositions described herein are provided in pre-filled syringes. When the immunogenic composition is prepared in a pre-filled syringe, an antigen and adjuvant is combined in advance of administration. In embodiments, the pre-filled syringe contains a CoV S glycoprotein and an adjuvant (e.g., a saponin adjuvant). In embodiments, the pre-filled syringe contains a CoV S glycoprotein and a saponin adjuvant, wherein the adjuvant comprises at least two iscom particles, wherein the first iscom particle comprises fraction A of Quillaja Saponaria Molina and not fraction C of Quillaja Saponaria Molina; and the second iscom particle comprises fraction C of Quillaja Saponaria Molina and not fraction A of Quillaja Saponaria Molina; wherein fraction A of Quillaja Saponaria Molina and fraction C of Quillaja Saponaria Molina account for about 85% by weight and about 15% by weight, respectively, of the sum of weights of fraction A of Quillaja Saponaria Molina and fraction C of Quillaja Saponaria Molina in the adjuvant. In embodiments, the pre-filled syringe contains a CoV S glycoprotein and a saponin adjuvant, wherein the adjuvant comprises at least two iscom particles, wherein the first iscom particle comprises fraction A of Quillaja Saponaria Molina and not fraction C of Quillaja Saponaria Molina; and the second iscom particle comprises fraction C of Quillaja Saponaria Molina and not fraction A of Quillaja Saponaria Molina; wherein fraction A of Quillaja Saponaria Molina and fraction C of Quillaja Saponaria Molina account for about 92% by weight and about 8% by weight, respectively, of the sum of weights of fraction A of Quillaja Saponaria Molina and fraction C of Quillaja Saponaria Molina in the adjuvant. In embodiments, the pre-filled syringe contains a CoV S glycoprotein and a saponin adjuvant, wherein the adjuvant comprises at least two iscom particles, wherein the first iscom particle comprises fraction A of Quillaja Saponaria Molina and not fraction C of Quillaja Saponaria Molina; and the second iscom particle comprises fraction C of Quillaja Saponaria Molina and not fraction A of Quillaja Saponaria Molina; wherein fraction A of Quillaja Saponaria Molina accounts for at least about 75% by weight and fraction C of Quillaja Saponaria Molina accounts for the remainder of the sum of weights of fraction A of Quillaja Saponaria Molina and fraction C of Quillaja Saponaria Molina in the adjuvant.

### EXAMPLES

### Example 1

### Expression and Purification of Pre-Fusion Coronavirus Spike(S) Polypeptide Nanoparticles

[0360] The native coronavirus (CoV) Spike(S) polypeptide (SEQ ID NO: 1 and SEQ ID NO:2) and CoV Spike polypeptides which have amino acid sequences corresponding to SEQ ID NOS: 3, 4, 38, 41, 44, 48, 51, 54, 58, 61, 63, 65, 67, 73, 75, 78, 79, 82, 83, 85, 87,106,108, 89, 112-115, 132, 133, 114, 138, 141, 144, 147, 151, 153, 156, 158, 174-176, 186, 188, 190, 195, 217-228, 233-236, and 245-292 were expressed in a baculovirus expression system and recombinant plaques expressing the CoV S polypeptides were picked and confirmed. In each case the signal peptide was SEQ ID NO: 5, 154, 193, or 117. Additionally, CoV S polypeptides encoded by a nucleic acid of any one of SEQ ID NOS: 161, 162, 163, 164, 165, 166, 168, 169, 171, 172, 196-199, 201, 202, 204, 206, 208, 210, 212, 214, 216, and 237-292 were produced. Additionally, CoV S polypeptides that comprise the polypeptide sequence of SEQ ID NOS: 87, 159, 167, 160, 170, 174, 175, 186, 188, 190, 195, 217-228, 233-236, 243, 255-264, 273-280, 283, 284, 287, 288, 291, 292, 294, 296, 298, 300, 302, 304, 306, 308, 310, 312, 314, 316, 318, 320, 322, 324, 326, 328, 329, 330, 331, 332, 333, and 334 which is C-terminal to a signal peptide having the amino acid sequence of any one of SEQ ID NOS: 5, 154, 193, or 117 were produced.

[0361] Table 2A shows the sequence characteristics of the aforementioned CoV Spike polypeptides. Table 2B shows the sequences of additional CoV Spike polypeptides that are being produced. The CoV S polypeptides of Table 2B have from about 1 to about 50 modifications compared to a CoV S polypeptide of Table 2A. The modifications may be in the RBD, NTD, SD1/2, S1 subunit, or S2 subunit. The modifications may also be proximal to the furin cleavage domain.

TABLE 2A
Selected CoV Spike Polypeptides

| CoV S polypeptide | SEQ ID NO. |
|---|---|
| BV2364 | 48 |
| BV2365 | 4 |
| BV2361/BV2366 | 2 |
| BV2367 | 63 |
| BV2368 | 65 |
| BV2369 | 67 |
| BV2373, formulated into a composition referred | 87 |
| to herein as “NVX-CoV2373” | |
| BV2374 | 85 |
| BV2374 | 58 |
| BV2384 | 110 |
| BV2425 | 114 |
| BV2426 | 115 |
| BV2438 | 132 |
| BV2423 | 133 |
| BV2425 | 114 |
| BV2425-2 | 138 |
| BV2439 | 141 |
| BV2441 | 144 |
| BV2442 | 147 |
| BV2443 | 151 |
| BV2448 | 153 |
| BV1.526NY-1 | 156 |
| BV1.526NY-2 | 158 |
| BV2508 | 174 |
| BV2509 | 175 |
| BV2465 | 176 |
| BV2457 | 181 |
| BV2472 | 182 |
| BV2480 | 183 |
| BV2481 | 184 |
| BV2523 | 195 |
| BV2540 | 192 |
| BV2541 | 190 |
| BV2515 | 188 |
| BV2542 | 186 |
| BV2515-1 | 217 |
| BV2523-1 | 218 |
| BV2540-1 | 222 |
| BV2541-1 | 221 |
| BV2549 | 219 |
| BV2542-2 | 220 |
| BV2562 | 225 |
| BV2559 | 223 |
| BV2577 | 224 |
| BV2578 | 226 |
| BV2589 | 227 |
| BV2590 | 228 |
| BV2592 | 233 |
| XBB.1 | 234 |
| BV2591 | 235 |
| BN.1 | 236 |
| Deltacron | 243 |
| BV2561 | 244 |

TABLE 2B
Selected CoV Spike Polypeptides

| CoV S polypeptide | SEQ ID NO. |
|---|---|
| 1A | 245 |
| 1B | 246 |
| 1C | 247 |
| 1D | 248 |
| 1E | 249 |
| 1A-1 | 250 |
| 1B-1 | 251 |
| 1C-1 | 252 |
| 1D-1 | 253 |
| 1E-1 | 254 |
| 1A-2 | 255 |
| 1B-2 | 256 |
| 1C-2 | 257 |
| 1D-2 | 258 |
| 1E-2 | 259 |
| 1A-3 | 260 |
| 1B-3 | 261 |
| 1C-3 | 262 |
| 1D-3 | 263 |
| 1E-3 | 264 |
| 2A | 265 |
| 2B | 266 |
| 2C | 267 |
| 2D | 268 |
| 2A-1 | 269 |
| 2B-1 | 270 |
| 2C-1 | 271 |
| 2D-1 | 272 |
| 2A-2 | 273 |
| 2B-2 | 274 |
| 2C-2 | 275 |
| 2D-2 | 276 |
| 2A-3 | 277 |
| 2B-3 | 278 |
| 2C-3 | 279 |
| 2D-3 | 280 |
| 3A-1 | 281 |
| 3A-2 | 285 |
| 3A-3 | 289 |
| 3B-1 | 282 |
| 3B-2 | 286 |
| 3B-3 | 290 |
| 3C-1 | 283 |
| 3C-2 | 287 |
| 3C-3 | 291 |
| 3D-1 | 284 |
| 3D-2 | 288 |
| 3D-3 | 292 |

### Protein and Nanoparticle Production

[0362] The recombinant baculovirus was amplified by infection of Sf9 or rhabdovirus-free Sf22a insect cells. A culture of insect cells was infected at ˜0.6 MOI (Multiplicity of infection=virus ffu or pfu/cell) with baculovirus. The insect cell culture may be infected with baculoviruses that express different CoV S glycoproteins. For example, the insect cell culture may be infected with baculoviruses expressing five different CoV S glycoproteins. The culture and supernatant is harvested 48-72 hrs post-infection. The crude cell harvest, approximately 30 mL, is clarified by centrifugation for 15 minutes at approximately 800×g. The resulting crude cell harvests containing the coronavirus Spike(S) protein are purified as nanoparticles as described below.

[0363] To produce nanoparticles, non-ionic surfactant TERGITOL® nonylphenol ethoxylate NP-9 is used in the membrane protein extraction protocol. Crude extraction is further purified by passing through anion exchange chromatography, lentil lectin affinity/HIC and cation exchange chromatography. The washed cells are lysed by detergent treatment and then subjected to low pH treatment which leads to precipitation of BV and Sf9 host cell DNA and protein. The neutralized low pH treatment lysate is clarified and further purified on anion exchange and affinity chromatography before a second low pH treatment is performed.

[0364] Affinity chromatography is used to remove Sf9/BV proteins, DNA and NP-9, as well as to concentrate the coronavirus Spike(S) protein. Briefly, lentil lectin is a metalloprotein containing calcium and manganese, which reversibly binds polysaccharides and glycosylated proteins containing glucose or mannose. The coronavirus Spike(S) protein-containing anion exchange flow through fraction is loaded onto the lentil lectin affinity chromatography resin (Capto Lentil Lectin, GE Healthcare). The glycosylated coronavirus Spike(S) protein is selectively bound to the resin while non-glycosylated proteins and DNA are removed in the column flow through. Weakly bound glycoproteins are removed by buffers containing high salt and low molar concentration of methyl alpha-D-mannopyranoside (MMP).

[0365] The column washes are also used to detergent exchange the NP-9 detergent with the surfactant polysorbate 80 (PS80). The coronavirus Spike(S) polypeptides are eluted in nanoparticle structure from the lentil lectin column with a high concentration of MMP. After elution, the coronavirus Spike(S) protein trimers are assembled into nanoparticles composed of coronavirus Spike(S) protein trimers and PS80 contained in a detergent core.

Binding of CoV S Polypeptides to hACE2

[0366] The ability of the CoV S polypeptides to bind to hACE2 is evaluated by bio-layer interferometry and ELISA.

### Bio-Layer Interferometry (BLI)

[0367] The BLI experiments are performed using an Octet QK384 system (Pall Forté Bio, Fremont, CA). His-tagged human ACE2 (2 μg mL-1) was immobilized on nickel-charged Ni-NTA biosensor tips. After baseline, SARS-COV-2 S protein containing samples were 2-fold serially diluted and were allowed to associate for 600 seconds followed by dissociation for an additional 900 sec. Data is analyzed with Octet software HT 101:1 global curve fit.

[0368] The CoV S polypeptides of Table 2A retained the ability to bind to hACE2. Dissociation kinetics showed that the CoV S polypeptides remained tightly bound as evident by minimal or no dissociation over 900 seconds of observation in the absence of fluid phase S protein. The ability of the CoV S polypeptides of Table 2B to bind to hACE2 by BLI is evaluated.

### ELISA

[0369] The specificity of the CoV S polypeptides for hACE2 was confirmed by ELISA. Ninety-six well plates were coated with 100 μL SARS-COV-2 spike protein (2 μg/mL) overnight at 4° C. Plates were washed with phosphate buffered saline with 0.05% Tween (PBS-T) buffer and blocked with TBS Startblock blocking buffer (ThermoFisher, Scientific). His-tagged hACE2 and hDPP4 receptors were 3-fold serially diluted (5-0.0001 μg mL-1) and added to coated wells for 2 hours at room temperature. The plates were washed with PBS-T. Optimally diluted horseradish peroxidase (HRP) conjugated anti-histidine was added and color developed by addition of and 3,3′,5,5′-tetramethylbenzidine peroxidase substrate (TMB, T0440-IL, Sigma, St. Louis, MO, USA). Plates were read at an OD of 450 nm with a SpectraMax Plus plate reader (Molecular Devices, Sunnyvale, CA, USA) and data analyzed with SoftMax software. EC50 values were calculated by 4-parameter fitting using GraphPad Prism 7.05 software.

### Example 2

### Formulation of Pentavalent COVID-19 Immunogenic Composition

[0370] Pentavalent COVID-19 immunogenic compositions are formulated. The pentavalent COVID-19 immunogenic comprises five CoV S glycoproteins. Each of the first, second, third, fourth, and fifth CoV S glycoproteins may have an inactivated furin cleavage site. The inactivated furin cleavage site may comprise the amino sequence of QQAQ (SEQ ID NO: 7). Each of the first, second, third, fourth, and fifth CoV S glycoproteins may also have modifications at amino acids 986 and 987, wherein each CoV S glycoprotein is numbered with respect to a CoV S glycoprotein of SEQ ID NO: 1. Amino acids 986 and 987 of one or more of the first, second, third, fourth, and fifth CoV S glycoproteins may be proline.

[0371] Table 2C1 shows the identity of the five CoV S glycoproteins in each immunogenic composition. The second, third, fourth, and fifth CoV S glycoproteins have one or more modifications compared to the first CoV S glycoprotein. Each of the first, second, third, fourth, and fifth CoV S glycoproteins in the immunogenic compositions have different amino acid sequences. Table 2C2 shows possible first, second, third, fourth, and fifth CoV S glycoproteins in the compositions and shows their modifications relative to a CoV S glycoprotein of SEQ ID NO: 1.

[0372] Compared to the first CoV S glycoprotein in the composition, one or more of the second, third, fourth, and fifth CoV S glycoprotein may have modifications in the receptor binding domain, N-terminal domain, S1 subunit, S2 subunit, or SD1/2. The modifications may occur at positions 180, 252, 253, 444, 478, 486, 521, or a combination thereof, wherein the modifications are numbered with respect to a CoV S polypeptide of SEQ ID NO: 1. Position 180 of the CoV S polypeptide may be glutamate or valine, wherein the CoV S polypeptide is numbered within respect to SEQ ID NO: 1. Position 252 of the CoV S polypeptide may be glycine or valine, wherein the CoV S polypeptide is numbered within respect to SEQ ID NO: 1. Position 253 of the CoV S polypeptide may be aspartate or glycine, wherein the CoV S polypeptide is numbered within respect to SEQ ID NO: 1. Position 444 of the CoV S polypeptide may be threonine or lysine, wherein the CoV S polypeptide is numbered within respect to SEQ ID NO: 1. Position 478 of the CoV S polypeptide may be threonine, arginine, or lysine, wherein the CoV S polypeptide is numbered within respect to SEQ ID NO: 1. Position 486 of the CoV S polypeptide may be threonine or serine wherein the CoV S polypeptide is numbered within respect to SEQ ID NO: 1. Position 521 of the CoV S polypeptide may be proline or serine, wherein the CoV S polypeptide is numbered within respect to SEQ ID NO: 1.

TABLE 2C1

| | | Second, Third, Fourth, and |
|---|---|---|
| Composition | First CoV S Glycoprotein | Fifth CoV S Glycoprotein |
| 1 | A CoV S glycoprotein with at least 90%, | A CoV S glycoprotein with at least 90%, |
| | at least 91%, at least 92%, at least | at least 91%, at least 92%, at least |
| | 93%, at least 94%, at least 95%, at | 93%, at least 94%, at least 95%, at |
| | least 96%, at least 97%, at least 98%, | least 96%, at least 97%, at least 98%, |
| | at least 99%, or 100% identity to any | at least 99%, or 100% identity to |
| | one of SEQ ID NO: 245, SEQ ID NO: | any one of SEQ ID NOS: 246-249, |
| | 250, SEQ ID NO: 255, and SEQ ID | 251-254, 256-259, and 261-264 |
| | NO: 260 | |
| 2 | A CoV S glycoprotein with at least 90%, | A CoV S glycoprotein with at least 90%, |
| | at least 91%, at least 92%, at least | at least 91%, at least 92%, at least |
| | 93%, at least 94%, at least 95%, at | 93%, at least 94%, at least 95%, at |
| | least 96%, at least 97%, at least 98%, | least 96%, at least 97%, at least 98%, |
| | at least 99%, or 100% identity to any | at least 99%, or 100% identity to |
| | one of SEQ ID NO: 265, SEQ ID NO: | any one of SEQ ID NOS: 267-272, |
| | 266, SEQ ID NO: 273, and SEQ ID | 275-280 |
| | NO: 274 | |
| 3 | A CoV S glycoprotein with at least 90%, | A CoV S glycoprotein with at least 90%, |
| | at least 91%, at least 92%, at least | at least 91%, at least 92%, at least |
| | 93%, at least 94%, at least 95%, at | 93%, at least 94%, at least 95%, at |
| | least 96%, at least 97%, at least 98%, | least 96%, at least 97%, at least 98%, |
| | at least 99%, or 100% identity to any | at least 99%, or 100% identity to |
| | one of SEQ ID NOS: 281-284 | any one of SEQ ID NOS: 285-292 |
| 4 | A CoV S glycoprotein with at least 90%, | A CoV S glycoprotein with at least 90%, |
| | at least 91%, at least 92%, at least | at least 91%, at least 92%, at least |
| | 93%, at least 94%, at least 95%, at | 93%, at least 94%, at least 95%, at |
| | least 96%, at least 97%, at least 98%, | least 96%, at least 97%, at least 98%, |
| | at least 99%, or 100% identity to any | at least 99%, or 100% identity to |
| | one of SEQ ID NO: 245, SEQ ID NO: | any one of SEQ ID NOS: 246-249, |
| | 250, SEQ ID NO: 255, and SEQ ID | 251-254, 256-259, 261-264, 267-272, |
| | NO: 260 | 275-280, and 285-292 |
| 5 | A CoV S glycoprotein with at least 90%, | A CoV S glycoprotein with at least 90%, |
| | at least 91%, at least 92%, at least | at least 91%, at least 92%, at least |
| | 93%, at least 94%, at least 95%, at | 93%, at least 94%, at least 95%, at |
| | least 96%, at least 97%, at least 98%, | least 96%, at least 97%, at least 98%, |
| | at least 99%, or 100% identity to any | at least 99%, or 100% identity to |
| | one of SEQ ID NO: 265, SEQ ID NO: | any one of SEQ ID NOS: 246-249, |
| | 266, SEQ ID NO: 273, and SEQ ID | 251-254, 256-259, 261-264, 267-272, |
| | NO: 274 | 275-280, and 285-292 |
| 6 | A CoV S glycoprotein with at least 90%, | A CoV S glycoprotein with at least 90%, |
| | at least 91%, at least 92%, at least | at least 91%, at least 92%, at least |
| | 93%, at least 94%, at least 95%, at | 93%, at least 94%, at least 95%, at |
| | least 96%, at least 97%, at least 98%, | least 96%, at least 97%, at least 98%, |
| | at least 99%, or 100% identity to any | at least 99%, or 100% identity to |
| | one of SEQ ID NOS: 281-284 | any one of SEQ ID NOS: 246-249, |
| | | 251-254, 256-259, 261-264, 267-272, |
| | | 275-280, and 285-292 |

[0373] The five CoV S polypeptide nanoparticles are produced according to the procedures of Example 1 and suspended in a pharmaceutically acceptable buffer to form an immunogenic composition. An adjuvant may be added to the composition. The adjuvant may be a saponin adjuvant. For example, the saponin adjuvant may contain two iscom particles, wherein: the first iscom particle comprises fraction A of Quillaja Saponaria Molina and not fraction C of Quillaja Saponaria Molina; and the second iscom particle comprises fraction C of Quillaja Saponaria Molina and not fraction A of Quillaja Saponaria Molina. Fraction A and Fraction C account for 85% and 15% by weight, respectively, of the sum of the weights of fraction A of Quillaja Saponaria Molina and fraction C of Quillaja Saponaria Molina in the adjuvant.

TABLE 2C2
CoV S Polypeptides

| | | Modification (numbered according |
|---|---|---|
| CoV S polypeptide | SEQ ID NO. | to SEQ ID NO: 1) |
| 1A | 245 | |
| 1B | 246 | P521S |
| 1C | 247 | K444T |
| 1D | 248 | F486S |
| 1E | 249 | T478K |
| 1A-1 | 250 | |
| 1B-1 | 251 | P521S |
| 1C-1 | 252 | K444T |
| 1D-1 | 253 | F486S |
| 1E-1 | 254 | T478K |
| 1A-2 | 255 | |
| 1B-2 | 256 | P521S |
| 1C-2 | 257 | K444T |
| 1D-2 | 258 | F486S |
| 1E-2 | 259 | T478K |
| 1A-3 | 260 | |
| 1B-3 | 261 | P521S |
| 1C-3 | 262 | K444T |
| 1D-3 | 263 | F486S |
| 1E-3 | 264 | T478K |
| 2A | 265 | |
| 2B | 266 | Inactive primary furin cleavage site, |
| | | mutation of amino acids 986 and 987 |
| | | to proline |
| 2C | 267 | P521S |
| 2D | 268 | Inactive primary furin cleavage site, |
| | | mutation of amino acids 986 and 987 |
| | | to proline, P521S |
| 2A-1 | 269 | K444T |
| 2B-1 | 270 | Inactive primary furin cleavage site, |
| | | mutation of amino acids 986 and 987 |
| | | to proline, K444T |
| 2C-1 | 271 | F486S |
| 2D-1 | 272 | Inactive primary furin cleavage site, |
| | | mutation of amino acids 986 and 987 |
| | | to proline, K444T, F486S |
| 2A-2 | 273 | |
| 2B-2 | 274 | Inactive primary furin cleavage site, |
| | | mutation of amino acids 986 and 987 |
| | | to proline |
| 2C-2 | 275 | P521S |
| 2D-2 | 276 | Inactive primary furin cleavage site, |
| | | mutation of amino acids 986 and 987 |
| | | to proline, P521S |
| 2A-3 | 277 | K444T |
| 2B-3 | 278 | Inactive primary furin cleavage site, |
| | | mutation of amino acids 986 and 987 |
| | | to proline, K444T |
| 2C-3 | 279 | F486S |
| 2D-3 | 280 | Inactive primary furin cleavage site, |
| | | mutation of amino acids 986 and 987 |
| | | to proline, K444T, F486S |
| 3A-1 | 281 | |
| 3A-2 | 285 | K444T |
| 3A-3 | 289 | T486S |
| 3B-1 | 282 | Inactive primary furin cleavage site, |
| | | mutation of amino acids 986 and 987 |
| | | to proline |
| 3B-2 | 286 | Inactive primary furin cleavage site, |
| | | mutation of amino acids 986 and 987 |
| | | to proline, K444T |
| 3B-3 | 290 | Inactive primary furin cleavage site, |
| | | mutation of amino acids 986 and 987 |
| | | to proline, T486S |
| 3C-1 | 283 | |
| 3C-2 | 287 | K444T |
| 3C-3 | 291 | T486S |
| 3D-1 | 284 | Inactive primary furin cleavage site, |
| | | mutation of amino acids 986 and 987 |
| | | to proline |
| 3D-2 | 288 | Inactive primary furin cleavage site, |
| | | mutation of amino acids 986 and 987 |
| | | to proline, K444T |
| 3D-3 | 292 | Inactive primary furin cleavage site, |
| | | mutation of amino acids 986 and 987 |
| | | to proline, T486S |

### Example 3

### Immunogenicity of Monovalent and Bivalent COVID-19 Immunogenic Compositions

[0374] Monovalent COVID-19 immunogenic compositions were prepared that contained one COV S glycoprotein. Bivalent COVID-19 immunogenic compositions were also prepared which had two CoV S glycoproteins. The immunogenicity of the immunogenic compositions below was evaluated. Table C3 shows the identity of the CoV S glycoproteins in each composition.

TABLE C3

| | Amino acid sequence of CoV S |
|---|---|
| Composition | glycoprotein(s) in composition |
| 1 (also referred to as “XBB.1.16”) | SEQ ID NO: 260 |
| 2 (also referred to as (“XBB.1.5”) | SEQ ID NO: 274 |
| 3 (also referred to as (“Prototype”) | SEQ ID NO: 87 |
| 4 (also referred to as (“Prototype + | SEQ ID NO: 87 and |
| XBB.1.5”) | SEQ ID NO: 274 |
| 5 (also referred to as “Prototype + | SEQ ID NO: 87 and |
| BA.5”) | SEQ ID NO: 222 |
| 6 (also referred to as “BA.5”) | SEQ ID NO: 222 |

[0375] The CoV S glycoprotein nanoparticles were produced according to the procedures of Example 1 and suspended in a pharmaceutically acceptable buffer to form an immunogenic composition. Each composition contained a saponin adjuvant that contained two iscom particles, wherein: the first iscom particle comprises fraction A of Quillaja Saponaria Molina and not fraction C of Quillaja Saponaria Molina; and the second iscom particle comprises fraction C of Quillaja Saponaria Molina and not fraction A of Quillaja Saponaria Molina. Fraction A and Fraction C account for 85% and 15% by weight, respectively, of the sum of the weights of fraction A of Quillaja Saponaria Molina and fraction C of Quillaja Saponaria Molina in the adjuvant.

### Administration of Monovalent Compositions

[0376] Groups of mice (n=10) were inoculated intramuscularly with two doses of Composition 3, two doses of Composition 2, or two doses of Composition 1. FIGS. 3A-3C shows that Composition 3 (FIG. 3A, FIG. 3D), Composition 2 (FIG. 3B, FIG. 3E), and Composition 1 (FIG. 3C, FIG. 3F) each neutralized pseudoviruses expressing S proteins from various SARS-COV-2 heterogeneous strains. Humoral responses following administration of Composition 2 and Composition 1 were comparable and highly immunogenic as they induced pseudovirus neutralizing antibodies against SARS-COV-2 Omicron BA.5, XBB.1.5, XBB.1.16, XBB.2.3, EG.5.1, and XBB.1.16.6. (FIG. 3E, FIG. 3F). Following the primary vaccination series, homologous variant responses for Composition 2 (GMT-4148, 95% CI: 2494-6900) and Composition 1 (GMT=7622, 95% CI: 4451-13053) vaccinations were slightly higher than heterologous responses for Composition 2 to a pseudovirus expressing the SARS-COV-2 S glycoprotein of Composition 1 (GMT=3473, 95% CI: 2282-5287) and Composition 1 to a SARS-COV-2 pseudovirus expressing the SARS-COV-2 S glycoprotein of Composition 2 (GMT=5846, 95% CI: 2863-11940) (FIG. 3E, FIG. 3F). Compared to homologous variant responses, EG.5.1 neutralization responses were similar in magnitude following immunization with XBB.1.5 (GMT=6478, 95% CI: 3464-12112) and XBB.1.16 (GMT=5770, 95% CI: 1918-17358). (FIG. 3E). XBB.1.16.6 variant neutralization responses were also similar following immunization with XBB.1.5 (GMT=5548, 95% CI: 1960-15704), and XBB.1.16 (GMT=10781, 95% CI: 5413-21472) (FIG. 3E). The magnitude of EG.5.1 and XBB subvariant responses were comparable to the levels achieved with homologous responses to a two-dose primary series of Prototype vaccine, suggesting adequate antibody levels were achieved.

### Immunogenicity Induced by Bivalent Composition 4 Compared to Monovalent Composition 2

[0377] Mice (n=10 per group) were inoculated intramuscularly with Composition 2 (1 μg) or Composition 4, a bivalent composition containing 0.5 μg Prototype CoV S glycoprotein (SEQ ID NO: 87) and 0.5 μg XBB.1.5 (SEQ ID NO: 274), on days 0 and 14, and sera were collected at day 21 (1 week after the second dose). FIGS. 4A-4B show that administration of two doses of Composition 2 (FIG. 4A, FIG. 4C), a monovalent composition comprising a CoV S glycoprotein of SEQ ID NO: 274, results in a superior immune response in mice to administration of two doses of Composition 4 (FIG. 4B, FIG. 4D), the bivalent composition containing a CoV S glycoprotein of SEQ ID NO: 274 and a CoV S glycoprotein of SEQ ID NO: 87. Specifically, the monovalent composition elicited cross-reactive pseudovirus neutralizing antibodies against the SARS-COV-2 Variant Strains, Omicron XBB.1.5 (GMT=4554, 95% CI: 3285-6313), XBB.1.16 (GMT=4156, 95% CI: 2568-6724), and XBB.2.3 (GMT=2058, 95% CI: 1019-4157). In contrast, the bivalent composition induced a ˜50% or lower response to XBB.1.5 (GMT=981, 95% CI: 625-1541), XBB.1.16 (GMT=2168, 95% CI: 1387-3389), and XBB.2.3 (GMT=524, 95% CI: 224-1227)

### Effect of Administering Composition 5 as Primary Series and Composition 2 or Composition 1 Boosters on Immunogenicity Against SARS-COV-2 Variants

[0378] Groups of mice (n=10 per group) were inoculated intramuscularly with a primary immunization series of a bivalent vaccine (Composition 5) on days 0 and 14, followed by a single booster dose with either Composition 2 or Composition 1 on day 47. Sera were collected at day 21 (1 week after the second dose) and day 61 (2 weeks after booster dose).

[0379] FIGS. 5A-5C and FIGS. 6A-6C shows the immune response induced by a boost dose containing Composition 2 (FIG. 5B FIG. 6B, FIG. 5E) or Composition 1 (FIG. 5C, FIG. 5F, FIG. 6C). Boosting with either Composition 2 (FIG. 5B, FIG. 6B, FIG. 5E) or Composition 1 (FIG. 5C, FIG. 5F, FIG. 6C) resulted in an improved immune response against pseudoviruses expressing S proteins from various SARS-COV-2 heterogeneous strains, as compared to mice that were not boosted (FIG. 5A, FIG. 5D, FIG. 6A). Specifically, boosting with Composition 2 or Composition 1 induced a >35-fold increase in pseudovirus neutralizing antibodies against SARS-COV-2 pseudoviruses expressing the SARS-COV-2 S glycoprotein of Composition 2 or Composition 1 (FIGS. 5D-5F). Pseudovirus neutralizing antibodies were higher against XBB.2.3 following immunization with Composition 2 (GMT=4561, 95% CI: 2219-9375) compared to levels after immunization with Composition 1 (GMT=2938, 95% CI: 1495-5774).

[0380] Pseudovirus neutralizing antibody responses in mice were further analyzed by antigenic cartography. Priming with Composition 5 resulted in an immune response to Omicron XBB.1.5 and XBB.1.16 variants that was 30-fold greater than priming with Composition 3 (FIG. 6A). Boosting primed mice with Composition 2 induced a matched response to XBB.1.16, with an antigenic distance of 0.691 (FIG. 6B). Similarly, a boost with Composition 1 induced a matched response to XBB.1.5 with a fold-difference of 0.750 (FIG. 6C). Antigenic distances with a fold-difference less than 2-fold are considered to be matched responses.

[0381] FIG. 8 shows the ability of a dosage regimen comprising administering two doses of Composition 5 followed by boosting with Composition 2 to induce an immune response that blocks binding of hACE 2 to a SARS-COV-2 S glycoprotein.

### CD4+ T Cell Responses in Mice:

[0382] Mice were administered two doses of Composition 3, which contains a CoV S glycoprotein of SEQ ID NO: 87 or two doses of Composition 5, which comprises a CoV S glycoprotein of SEQ ID NO: 87 and a CoV S glycoprotein of SEQ ID NO: 222. The mice were boosted with Composition 2.

[0383] Th1 (IFN-γ, IL-2, and TNF-α) and Th2 (IL-4) cytokine-producing CD4+ T cells were measured in splenocytes isolated two weeks post booster dose. A robust CD4+ T cell response was recalled at comparable levels post boost upon boosting with Composition 2, irrespective of priming vaccine (i.e., Composition 3 or Composition 5) (FIG. 10A, FIG. 10B).

Results from Primary Vaccine Regimen Followed by Boosting in Rhesus Macaques:

[0384] Rhesus macaques (Macaca mulatta; n=5 per group) were administered two doses of Composition 3, which contains a CoV S glycoprotein of SEQ ID NO: 87, two doses of Composition 6, which comprises a CoV S glycoprotein of SEQ ID NO: 222, or two doses of Composition 5, which comprises a CoV S glycoprotein of SEQ ID NO: 87 and a CoV S glycoprotein of SEQ ID NO: 222 on days 0 and 21. These doses are “priming” doses. The macaques were boosted with Composition 2 on day 246, which contains a CoV S glycoprotein of SEQ ID NO: 274. All macaques were monitored twice daily to determine the safety of the vaccines, and no local or systemic side effects were reported after the primary series or booster vaccinations.

[0385] Boosting with Composition 2 resulted in comparable neutralizing responses to pseudoviruses expressing XBB1.5, XBB 1.16 S, XBB.2.3, and EG.5.1 glycoproteins. Priming with a composition containing a CoV S glycoprotein of SEQ ID NO: 222 (Compositions 5 and 6) resulted in superior neutralization compared to priming with compositions lacking a CoV S glycoprotein of SEQ ID NO: 222 (Composition 3) (FIGS. 7A-7E). Specifically, priming with a composition containing a CoV S glycoprotein of SEQ ID NO: 222 (e.g., Compositions 5 and 6) resulted in higher neutralizing antibody titers against Omicron XBB variants than priming with Composition 3. Boosting with Composition 2 also resulted in the induction of an immune response that blocks the interaction between hACE2 and the CoV S glycoprotein. (FIGS. 9A-9C). FIG. 11 shows the CD4+ T cell response in Rhesus macaques administered two doses of Composition 5, followed by a boost dose of Composition 2. Macaques primed with bivalent vaccine (Composition 5) and boosted with XBB.1.5 (Composition 2) elicited a Th1-biased cellular response with comparable magnitudes of cytokine-positive cells for all variants tested (FIG. 11).

### Example 4

### Immunogenicity of Immunogenic Compositions of Example 2 and 3 in Mice

[0386] The immunogenic compositions described in Examples 2 and 3 are evaluated for immunogenicity and toxicity in a murine model, using female BALB/c mice (7-9 weeks old; Harlan Laboratories Inc., Frederick, MD). The compositions are evaluated in the presence of an adjuvant (e.g., the saponin adjuvant of Example 2). The compositions may contain from 1 μg to about 200 μg of adjuvant and from 0.01 μg of CoV S polypeptide to about 100 μg of CoV S polypeptide. Immunogenic compositions are administered intramuscularly as a single dose (also referred to as a single priming dose) (study day 14) or as two doses (also referred to as a prime/boost regimen) spaced 14 to 21-days apart. A placebo group served as a non-immunized control. Serum is collected for analysis on study days 1, 13, 21, 28, and 35. Serum is analyzed for the presence of anti-Spike antibodies.

[0387] To evaluate the induction of protective immunity, immunized mice are challenged with SARS-COV-2. Since mice do not support replication of the wild-type SARS-COV-2 virus, on day 52 post initial vaccination, mice are intranasally infected with an adenovirus expressing hACE2 (Ad/hACE2) to render them permissive. Immunized and control animals are intranasally challenged with SARS-COV-2 42 days following one (a single dose) or two (two doses) immunizations. Challenged mice are weighed on the day of infection and daily for up to 7 days post infection. At 4- and 7-days post infection, 5 mice are sacrificed from each vaccination and control group, and lungs were harvested and prepared for pulmonary histology.

[0388] The viral titer is quantified by a plaque assay. Briefly, the harvested lungs are homogenized in PBS using 1.0 mm glass beads (Sigma Aldrich) and a Beadruptor (Omini International Inc.). Homogenates were added to Vero E6 near confluent cultures and SARS-COV-2 virus titers determined by counting plaque forming units (pfu) using a 6-point dilution curve.

[0389] The effect of the immunogenic compositions on the induction of cellular immunity is also evaluated. Spleens are collected 7-days after the second immunization (study day 28). A non-vaccinated group (N=3) served as a control.

### T Cell Response

[0390] The effect of the immunogenic compositions on the T cell response are evaluated. Antigen-specific T cell responses are measured by ELISPOT™ enzyme linked immunosorbent assay and intracellular cytokine staining (ICCS) from spleens collected 7-days after the second immunization (study day 28). The frequency of IFN-γ+, TNF-α+, and IL-2+ cytokine-secreting CD4+ and CD8+ T cells is evaluated. Type 2 cytokine IL-4 and IL-5 secretion from CD4+ T cells is also determined by ICCS and ELISPOT™ respectively. Finally, the effect of immunization on germinal center formation is assessed by measuring the frequency of CD4+ T follicular helper (TFH) cells and germinal center (GC) B cells in spleens.

### Example 5

### Immunogenicity of Immunogenic Composition of Examples 2 and 3 in Olive Baboons and Cynomolgous Macaques

[0391] The immunogenicity of the immunogenic compositions of Examples 2 and 3 is evaluated in baboons and cynomolgus macaques. Adult olive baboons and/or cynomolgus macaques are immunized with any one of the immunogenic compositions of Example 2 and/or 3 with and without adjuvant in two doses spaced 21-days apart. Anti-S protein IgG titers are measured every day after immunization. The level of hACE2 receptor blocking antibodies is also evaluated.

[0392] The effect of the immunogenic composition on cellular immunity is also evaluated. PBMCs are collected 7 days after the second immunization (day 28), and the T cell response is measured by ELISPOT assay.

### Example 6

### Immunogenicity of Immunogenic Composition of Examples 2 and 3 in Humans

[0393] The safety and immunogenicity of the immunogenic compositions of Examples 2 and 3 are assessed in a Phase ½ study in adults. The first CoV S glycoprotein is present in the composition at about 3 μg to about 25 μg. The second, third, fourth, and fifth CoV S glycoproteins are present in the composition in smaller amounts. The total amount of CoV S glycoprotein evaluated is 5, 10, and 25 μg. The immunogenicity of the compositions is evaluated in the presence and absence of an adjuvant (e.g., the saponin adjuvant of Example 2A and 2B). About 50 μg adjuvant is present in the composition.

### Example 7

### Immunogenicity of Immunogenic Composition of Examples 2 and 3 in Mice

[0394] The pentavalent immunogenic compositions described in Example 2 and the bivalent and monovalent immunogenic compositions of Example 1 are evaluated for immunogenicity and toxicity in a BALB/c mouse model (10 per group). The compositions contain 5 μg saponin adjuvant. The compositions contain about 1 μg of S protein. As a control, a composition containing 1 μg of one CoV S glycoprotein and 5 μg saponin adjuvant is administered to the mice.

[0395] The saponin adjuvant contains two iscom particles, wherein: the first iscom particle comprises fraction A of Quillaja Saponaria Molina and not fraction C of Quillaja Saponaria Molina; and the second iscom particle comprises fraction C of Quillaja Saponaria Molina and not fraction A of Quillaja Saponaria Molina. Fraction A and Fraction C account for 85% and 15% by weight, respectively, of the sum of the weights of fraction A of Quillaja Saponaria Molina and fraction C of Quillaja Saponaria Molina in the adjuvant.

[0396] Three doses of the immunogenic compositions are administered to the mice. The first doses is administered on day 0. The second dose is administered 14 days after administration of the second dose (day 14). The third dose is administered 3-4 months after administration of the first dose (from day 104 to day 134). FIG. 2 shows a schematic of the dosage regimen.

[0397] Serum is collected from the mice on days 0, 14, 35, between days 35 and 104-134, and on one day from days 118 to 148.

[0398] Serum is analyzed for the presence of anti-Spike antibodies.

[0399] The ability of the serum to neutralize pseudovirus expressing CoV S glycoproteins is also evaluated.

[0400] To evaluate the induction of protective immunity, immunized mice are challenged with SARS-COV-2. Since mice do not support replication of the wild-type SARS-COV-2 virus, on day 52 post initial vaccination, mice are intranasally infected with an adenovirus expressing hACE2 (Ad/hACE2) to render them permissive. Immunized and control animals are intranasally challenged with SARS-COV-2 42 days following one (a single dose) or two (two doses) immunizations. Challenged mice are weighed on the day of infection and daily for up to 7 days post infection. At 4- and 7-days post infection, 5 mice are sacrificed from each vaccination and control group, and lungs were harvested and prepared for pulmonary histology.

[0401] The viral titer is quantified by a plaque assay. Briefly, the harvested lungs are homogenized in PBS using 1.0 mm glass beads (Sigma Aldrich) and a Beadruptor (Omini International Inc.). Homogenates were added to Vero E6 near confluent cultures and SARS-COV-2 virus titers determined by counting plaque forming units (pfu) using a 6-point dilution curve.

[0402] The effect of the immunogenic compositions on the induction of cellular immunity is also evaluated. Spleens are collected 7-days after the second immunization (study day 28). A non-vaccinated group (N=3) served as a control.

### T Cell Response

[0403] The effect of compositions on the T cell response is evaluated. Antigen-specific T cell responses are measured by ELISPOT™ enzyme linked immunosorbent assay and intracellular cytokine staining (ICCS) from spleens collected 7-days after the second immunization (study day 28). The frequency of IFN-γ+, TNF-α+, and IL-2+ cytokine-secreting CD4+ and CD8+ T cells is evaluated. Type 2 cytokine IL-4 and IL-5 secretion from CD4+ T cells is also determined by ICCS and ELISPOT™ respectively. Finally, the effect of immunization on germinal center formation is assessed by measuring the frequency of CD4+ T follicular helper (TFH) cells and germinal center (GC) B cells in spleens.

### Example 8

### Immunogenicity of Immunogenic Compositions in Mice

[0404] Immunogenic compositions comprising a SARS-COV-2 S glycoprotein and a saponin adjuvant were administered to BALB/c mice (n=10). The saponin adjuvant contained two iscom particles, wherein: the first iscom particle comprises fraction A of Quillaja Saponaria Molina and not fraction C of Quillaja Saponaria Molina; and the second iscom particle comprises fraction C of Quillaja Saponaria Molina and not fraction A of Quillaja Saponaria Molina. Fraction A and Fraction C account for 85% and 15% by weight, respectively, of the sum of the weights of fraction A of Quillaja Saponaria Molina and fraction C of Quillaja Saponaria Molina in the adjuvant. The SARS-COV-2 S glycoproteins were (i) a SARS-COV-2 S glycoprotein of SEQ ID NO: 260 (referred to as XBB.1.16), (ii) a SARS-COV-2 S glycoprotein of SEQ ID NO: 274 (referred to as XBB.1.5), (iii) a SARS-COV-2 S glycoprotein of SEQ ID NO: 87 (referred to as prototype), or (iv) a SARS-COV-2 S glycoprotein of SEQ ID NO: 284 (referred to as XBB2.3). The immunogenic compositions were administered according to the schedule in FIG. 12. Each immunogenic composition contained 1 μg SARS-COV-2 S glycoprotein and 5 μg of saponin adjuvant.

[0405] FIG. 13A shows the anti-S IgG antibodies in mice after administration of two doses of an immunogenic composition comprising the SARS-COV 2 S glycoprotein of SEQ ID NO: 274. FIG. 13B shows the anti-S IgG antibodies in mice after administration of two doses of an immunogenic composition comprising the SARS-COV 2 S glycoprotein of SEQ ID NO: 260. FIG. 14A shows that administration of two doses of an immunogenic composition comprising the SARS-COV 2 S glycoprotein of SEQ ID NO: 274 results in antibodies that block binding of SARS-COV-2 to hACE2. FIG. 14B shows that administration of two doses of an immunogenic composition comprising the SARS-COV 2 S glycoprotein of SEQ ID NO: 260 results in antibodies that block binding of SARS-COV-2 to hACE2. FIG. 15A and FIG. 16B shows that administration of two doses of an immunogenic composition comprising the SARS-COV 2 S glycoprotein of SEQ ID NO: 274 results in neutralization of pseudoviruses expressing SARS-COV-2 S glycoproteins. FIG. 15B and FIG. 16C shows that administration of two doses of an immunogenic composition comprising the SARS-COV 2 S glycoprotein of SEQ ID NO: 260 results in neutralization of pseudoviruses expressing SARS-COV-2 S glycoproteins. FIG. 16A shows the neutralizing antibody titer resulting from administering two doses of an immunogenic composition comprising the SARS-COV 2 S glycoprotein of SEQ ID NO: 87.

### Example 9

### Immunogenicity of Immunogenic Compositions in Mice

[0406] Immunogenic compositions comprising one or two SARS-COV-2 S glycoproteins and a saponin adjuvant were administered to BALB/c mice (n=10). The saponin adjuvant contained two iscom particles, wherein: the first iscom particle comprises fraction A of Quillaja Saponaria

[0407] Molina and not fraction C of Quillaja Saponaria Molina; and the second iscom particle comprises fraction C of Quillaja Saponaria Molina and not fraction A of Quillaja Saponaria Molina. Fraction A and Fraction C account for 85% and 15% by weight, respectively, of the sum of the weights of fraction A of Quillaja Saponaria Molina and fraction C of Quillaja Saponaria Molina in the adjuvant. The immunogenic compositions were administered according to the schedule in FIG. 17. The mice were administered a first dose and second dose of a first immunogenic composition on day 0 and day 14 (referred to as the “primary series.” The mice were administered a boost dose of a second immunogenic composition on day 44 (referred to as “1 month booster”).

[0408] Each first immunogenic composition contained 1 μg total SARS-COV-2 S glycoprotein and 5 μg saponin adjuvant. When two glycoproteins were present in the first immunogenic composition, each glycoprotein was present in the composition in equal amounts. The first compositions contained a saponin adjuvant and (i) a SARS-COV-2 S glycoprotein of SEQ ID NO: 227 (referred to as BQ.1.1), (ii) a SARS-COV-2 S glycoprotein of SEQ ID NO: 274 (referred to as XBB.1.5), (iii) a first SARS-COV-2 S glycoprotein of SEQ ID NO: 227 and a second SARS-COV-2 S glycoprotein of SEQ ID NO: 274 (referred to as BQ.1.1+XBB.1.5), or (iv) a first SARS-CoV-2 S glycoprotein of SEQ ID NO: 222 and a second SARS-COV-2 S glycoprotein of SEQ ID NO: 274 (referred to as BA.5+XBB.1.5). The 1 month booster contained a saponin adjuvant and (i) and a SARS-COV-2 S glycoprotein of SEQ ID NO: 274 (XBB.1.5) or (ii) a SARS-COV-2 S glycoprotein of SEQ ID NO: 260 (XBB.1.16) The immunogenic compositions were administered according to the schedule in FIG. 17.

[0409] FIG. 18A shows the anti-S IgG antibodies in serum of mice after administration of two doses of an immunogenic composition comprising the SARS-COV 2 S glycoprotein of SEQ ID NO: 274. FIG. 18B shows the neutralizing antibodies present in the serum of mice after administration of two doses of an immunogenic composition comprising the SARS-COV 2 S glycoprotein of SEQ ID NO: 274. FIG. 19A shows the antigenic cartography of neutralizing responses induced by immunizing with two doses of an immunogenic composition comprising the SARS-COV 2 S glycoprotein of SEQ ID NO: 274. FIG. 19B shows the antigenic cartography of neutralizing responses induced by boosting with an immunogenic composition comprising the SARS-COV 2 S glycoprotein of SEQ ID NO: 274. FIG. 19C shows the antigenic cartography of neutralizing responses induced by boosting with an immunogenic composition comprising the SARS-COV 2 S glycoprotein of SEQ ID NO: 260. FIG. 20A shows pseudovirus neutralizing titers induced by administering a SARS-COV-2 S glycoprotein of SEQ ID NO: 274 in the primary series. FIG. 20B shows pseudovirus neutralizing titers induced by administering a SARS-COV-2 S glycoprotein of SEQ ID NO: 274 in the one month boost. FIG. 20C shows pseudovirus neutralizing titers induced by administering a SARS-COV-2 S glycoprotein of SEQ ID NO: 260 in the one month boost.

### Example 10

### Immunogenicity of Immunogenic Compositions in Rhesus Macaques

[0410] Immunogenic compositions comprising one or two SARS-COV-2 S glycoproteins and a saponin adjuvant were administered to Rhesus macaques (n=5). The saponin adjuvant contained two iscom particles, wherein: the first iscom particle comprises fraction A of Quillaja Saponaria Molina and not fraction C of Quillaja Saponaria Molina; and the second iscom particle comprises fraction C of Quillaja Saponaria Molina and not fraction A of Quillaja Saponaria Molina. Fraction A and Fraction C account for 85% and 15% by weight, respectively, of the sum of the weights of fraction A of Quillaja Saponaria Molina and fraction C of Quillaja Saponaria Molina in the adjuvant. The immunogenic compositions were administered according to the schedule in FIG. 21. The macaques were administered a first dose and second dose of a first immunogenic composition on day 0 and day 21 (referred to as the “primary series”). The macaques were administered a boost dose of a second immunogenic composition on day 246 (referred to as “booster”).

[0411] The first and second immunogenic composition each contained 5 μg SARS-COV-2 S glycoprotein and 50 μg saponin adjuvant. The first compositions contained a saponin adjuvant and (i) a SARS-COV-2 S glycoprotein of SEQ ID NO: 87 (referred to as Prototype), (ii) a SARS-COV-2 S glycoprotein of SEQ ID NO: 222 (referred to as BA.5), (iii) a SARS COV-2 S glycoprotein of SEQ ID NO: 87 and a SARS-COV-2 S glycoprotein of SEQ ID NO: 222 (referred to as “Prototype+BA.5”), or (iv) a SARS-COV-2 S glycoprotein of SEQ ID NO: 274 (referred to as XBB.1.5″). The second immunogenic compositions contained a saponin adjuvant and (i) a SARS-COV-2 S glycoprotein of SEQ ID NO: 274 (referred to as XBB.1.5″) or (ii)) a SARS-COV-2 S glycoprotein of SEQ ID NO: 227 (referred to as BQ.1.1).

[0412] FIG. 22A shows the anti-S IgG antibodies in serum of macaques after administration of a first dose and a second dose containing the SARS-COV 2 S glycoprotein of SEQ ID NO: 87 and administration of a third dose containing a SARS-COV 2 S glycoprotein of SEQ ID NO: 274. FIG. 22B shows the anti-S IgG antibodies in serum of macaques after administration of a first dose and a second dose containing the SARS-COV 2 S glycoprotein of SEQ ID NO: 222 and administration of a third dose containing a SARS-COV 2 S glycoprotein of SEQ ID NO: 274. FIG. 22C shows the anti-S IgG antibodies in serum of macaques after administration of a first dose and a second dose containing the SARS-COV 2 S glycoprotein of SEQ ID NO: 87 and the SARS-COV-2 S glycoprotein of SEQ ID NO: 222 and administration of a third dose containing a SARS-COV 2 S glycoprotein of SEQ ID NO: 274. FIG. 23 shows the anti-S IgG antibodies in serum of macaques after administration of a first dose and a second dose containing the SARS-COV 2 S glycoprotein of SEQ ID NO: 274. FIG. 24 shows pseudovirus neutralizing titers induced by administering a SARS-COV-2 S glycoprotein of SEQ ID NO: 274 in the primary series. FIG. 25 shows the CD4+T cell response of macaques administered a first dose and a second dose containing the SARS-CoV 2 S glycoprotein of SEQ ID NO: 274. FIG. 26 shows the multifunctional antigen specific CD4+ T cell response of macaques administered a first dose and a second dose containing the SARS-COV 2 S glycoprotein of SEQ ID NO: 274.

### Example 11

### Immunogenicity of Immunogenic Compositions in Mice

[0413] Monovalent COVID-19 immunogenic compositions were prepared that contained one CoV S glycoprotein. Trivalent COVID-19 immunogenic compositions were also prepared which had three CoV S glycoproteins. The immunogenicity of the immunogenic compositions below was evaluated. Table C4 shows the identity of the CoV S glycoproteins in each composition.

TABLE C4

| | Amino acid sequence of CoV S |
|---|---|
| Composition | glycoprotein(s) in composition |
| 2 (also referred to as (“XBB.1.5”) | SEQ ID NO: 274 |
| 7 (also referred to as (“Prototype + | SEQ ID NO: 87 and |
| BA.5 + XBB.1.5”) | SEQ ID NO: 222 |
| | and SEQ ID NO: 274 |
| 8 (also referred to as “JN.1”) | SEQ ID NO: 329 |
| 9 (also referred to as “HV.1”) | SEQ ID NO: 334 |

[0414] Each monovalent COVID-19 immunogenic composition (Composition Nos. 2, 8-9) was prepared at 20 μg/mL CoV S rS+100 μg/mL Matrix-M to deliver 1 μg CoV S rS with 5 μg Matrix-M dose in 50 μL. Trivalent COVID-19 immunogenic compositions (Composition No. 7) were prepared at 20 μg/mL/each CoV S rS (60 μg/mL total CoV S rS)+100 μg/mL Matrix-M to deliver 1 μg CoV S rS/strain (3 μg rS total) with 5 μg Matrix-M dose in 50 μL.

[0415] Groups of mice (n=20) were inoculated intramuscularly in the following regime, shown in FIG. 27:

| | | Primary | Booster (2 month) |
|---|---|---|---|
| | | Day 0 and 14 | Day 77 |
| Group | N | 1 μg rS + 5 μg Matrix-M | 1 μg rS + 5 μg Matrix-M |
| 1 | 20 | Composition 2 | Composition 2 |
| 2 | 20 | | Composition 8 |
| 4 | 20 | Composition 7 | Composition 2 |
| 5 | 20 | | Composition 8 |
| 8 | 20 | Composition 8 | Animals terminated after |
| 9 | 20 | Composition 9 | 2 dose primary series |

[0416] Administration of Composition 2 or Composition 7 or Composition 8 followed by a booster dose of Composition 8 elicited cross-reactive pseudovirus neutralizing antibodies against SARS-CoV-2 Variant Strains, XBB.1.5, HV.1, JN.1, JN. 4, JN.1.11.1, JN.1.7, JN.1.16, and JN.1.13.1 (FIGS. 31, 32D, 33C, 34D, 35B).

[0417] FIG. 28A shows the anti-rS IgG antibodies in serum of mice after administration of two doses of an immunogenic composition comprising the SARS-COV 2 S glycoprotein of SEQ ID NO: 274. FIG. 28B shows the neutralizing antibodies present in the serum of mice after administration of two doses of an immunogenic composition comprising the SARS-COV 2 S glycoprotein of SEQ ID NO: 329. FIG. 29A shows pseudovirus neutralizing titers induced by administering a SARS-COV-2 S glycoprotein of SEQ ID NO: 274 in the primary series. FIG. 29B shows pseudovirus neutralizing titers induced by administering a SARS-COV-2 S glycoprotein of SEQ ID NO: 329 in the primary series.

[0418] FIG. 30 shows pseudovirus neutralizing titers and antigenic distances induced by administering a SARS-COV-2 S glycoprotein of SEQ ID NO: 274 in the primary series against different SARS-COV-2 variant strains, with low titers for JN.1 and JN.1 subvariants. Specifically, pseudovirus neutralizing titers and antigenic distances after primary vaccination series with Composition 2 were JN.1 (pVNT50=55; AU=6.582), JN.4 (pVNT50=51; AU=6.684), JN.1.11.1 (pVNT50=58; AU=6.515), JN.1.7 (pVNT50=56; AU=6.568), and JN.1.13.1 (pVNT50=58; AU=6.500). FIG. 31 shows pseudovirus neutralizing titers and antigenic distances induced by administering a SARS-COV-2 S glycoprotein of SEQ ID NO: 329 in the primary series against different SARS-COV-2 variant strains, with high titers for JN.1 and JN.1 subvariants. Specifically, pseudovirus neutralizing titers and antigenic distances after primary vaccination series with Composition 8 were JN.1 (pVNT50=11,215; AU=−), JN.4 (pVNT50=7,185; AU=0.642), JN.1.11.1 (pVNT50=7,650; AU=0.552), JN.1.7 (pVNT50=7,001; AU=0.680), JN.1.13.1 (pVNT50=14,583; AU=−0.379), and JN.1.16 (pVNT50=8,140; AU=0.462) (FIG. 31) when compared to XBB.1.5 (pVNT50=50; AU=7.81) and HV.1 (pVNT50=56; AU=7.65) subvariant response which were low.

[0419] FIGS. 32A-32D show the anti-rS IgG antibodies in serum of mice after administration of Composition 2 in the primary series (FIG. 32A), compared to the anti-rS IgG antibodies in serum of mice prior to administration of a boost dose (FIG. 32B), against the anti-rS IgG antibodies in serum of mice induced after administration of a boost dose containing Composition 2 (FIG. 32C) or Composition 8 (FIG. 32D).

[0420] FIGS. 33A-33C show pseudovirus neutralizing titers and antigenic distances induced by administering a SARS-COV-2 S glycoprotein of SEQ ID NO: 274 in the primary series followed by a boost dose containing Composition 8 (FIG. 33C) of Example 11. Boosting with Composition 8 (FIG. 33C) elicited an improved immune response against pseudoviruses expressing S proteins from various SARS-COV-2 heterogeneous strains, as compared to pre-boosted mice (FIG. 33B) who received a primary dose of Composition 2 (FIG. 33A).

[0421] FIGS. 34A-34B show pseudovirus neutralizing titers and antigenic distances induced by administering Composition 2 (FIG. 34A) in the primary series followed by a boost dose after 2 months containing Composition 8 (FIG. 34B) of Example 11. Boosting with Composition 8 elicited an improved immune response against pseudoviruses expressing S proteins from various SARS-CoV-2 heterogeneous strains (FIG. 34B). Specifically, pseudovirus neutralizing titers and antigenic distances after primary vaccination series with Composition 2 followed by a booter dose at 2 months of Composition 8 were JN.1 (pVNT50=2839; AU=−), JN.1.11.1 (pVNT50=2204; AU=0.365), JN.1.7 (pVNT50=2118; AU=0.423), JN.1.13.1 (pVNT50=2131; AU=0.414), XBB.1.5 (pVNT50=46668; AU=−4.04), and HV.1 (pVNT50=31899; AU=−3.49) (FIG. 34B).

[0422] FIGS. 35A-35B show pseudovirus neutralizing titers and antigenic distances induced by administering Composition 7 (FIG. 35A) in the primary series followed by a boost dose after 2 months containing Composition 8 (FIG. 35B) of Example 11. Boosting with Composition 8 (FIG. 35B) elicited an improved immune response against pseudoviruses expressing S proteins from various SARS-COV-2 heterogeneous strains. Specifically, pseudovirus neutralizing titers and antigenic distances after primary vaccination series with Composition 7 followed by a booter dose at 2 months of Composition 8 were JN.1 (pVNT50=1219; AU=−), JN.1.11.1 (pVNT50=1836; AU=−0.591), JN.1.7 (pVNT50=1434; AU=−0.234), XBB.1.5 (pVNT50=30035; AU=−4.62), and HV.1 (pVNT50=18341; AU=−3.91).

[0423] FIG. 36 shows the ratio of Th1/Th2 cytokines produced by CD4+ T cells in mice administered with doses of Composition 2 followed by a boost dose at 2 months with Composition 2. FIG. 37 shows the ratio of Th1/Th2 cytokines produced by CD4+ T cells in mice administered with doses of Composition 2 followed by a boost dose at 2 months with Composition 8. Th1 (IFN-Y, IL-2, and TNF-α) and Th2 (IL-4) cytokine-producing CD4+ T cells were measured in splenocytes isolated two month post booster dose with either Composition 2 or Composition 8. A robust CD4+ T cell response was recalled at comparable levels post boost upon boosting with Composition 8.

[0424] The effect of the immunogenic compositions on the T cell response are evaluated. Antigen-specific T cell responses are measured by ELISPOT™ enzyme linked immunosorbent assay and intracellular cytokine staining (ICCS) from spleens collected after the booster dose with Composition 2 or Composition 8 (study day 90). The frequency of IFN-γ+, TNF-α+, and IL-2+ cytokine-secreting CD4+ and CD8+ T cells is evaluated (FIGS. 38A-38B, 39A-39B, 40A-40B). Finally, the effect of immunization on germinal center formation is assessed by measuring the frequency of CD4+ T follicular helper (TFH) cells and germinal center (GC) B cells in spleens (FIGS. 41A-41B).

### Example 12

### Immunogenicity of Immunogenic Compositions in Rhesus Macaques

[0425] Immunogenic compositions comprising one or two SARS-COV-2 S glycoproteins and Matrix-M were administered to Rhesus macaques (n=5). The immunogenic compositions were administered according to the schedule in FIG. 42. The macaques were respectively administered a first dose and second dose of a first immunogenic composition on day 0 and day 21 (referred to as the “primary series”). The macaques were administered a boost dose of a second immunogenic composition on day 211 (referred to as “first booster”). The primed macaques were then administered a second boost dose of a third immunogenic composition on day 346 (referred to as “second booster”).

[0426] The immunogenic composition for intramuscular administration each contained 10 μg/mL SARS-COV-2 S glycoprotein and 100 μg/mL Matrix-M w to deliver 5 μg rS with 50 μg Matrix-M dose in 500 μL injection by intramuscular (IM) route. The immunogenic composition for IN administration each contained 50 μg/mL SARS-COV-2 S glycoprotein and 100 μg/mL Matrix-M to deliver 25 μg rS with 50 μg Matrix-M dose in 500 μL injection by IN route. The first and second compositions contained Matrix-M and a SARS-COV-2 S glycoprotein of SEQ ID NO: 274 (referred to as XBB.1.5). The third immunogenic composition contained Matrix-M and a SARS-CoV-2 S glycoprotein of SEQ ID NO: 329 (referred to as JN.1).

[0427] FIG. 43A shows the anti-rS responses in primed Rhesus macaques prior to administration of a second booster dose of an immunogenic composition comprising the SARS-COV 2 S glycoprotein of SEQ ID NO: 329. FIG. 43B shows the anti-rS responses in primed Rhesus macaques after administration of a second booster dose of an immunogenic composition comprising the SARS-COV 2 S glycoprotein of SEQ ID NO: 329.

[0428] FIG. 44A shows pseudovirus neutralizing titers and antigenic distances in primed Rhesus macaques prior to administration of a second booster dose of an immunogenic composition comprising the SARS-COV 2 S glycoprotein of SEQ ID NO: 329. FIG. 44B shows pseudovirus neutralizing titers and antigenic distances in primed Rhesus macaques after administration of a second booster dose of an immunogenic composition comprising the SARS-COV 2 S glycoprotein of SEQ ID NO: 329. A second booster dose of an immunogenic composition comprising the SARS-COV 2 S glycoprotein of SEQ ID NO: 329 elicited pseudovirus neutralizing antibodies against different SARS-COV-2 variant strains.

[0429] FIG. 45 shows the CD4+ T cell IFN-γ response in primed Rhesus macaques after administration of a second booster dose of an immunogenic composition comprising the SARS-CoV 2 S glycoprotein of SEQ ID NO: 329. A second booster dose of an immunogenic composition comprising the SARS-COV 2 S glycoprotein of SEQ ID NO: 329 elicited a Th1-biased cellular response and conserved T-cell epitopes recognized for all variants tested. FIG. 46 shows the multifunctional antigen specific CD4+ T cell response of primed Rhesus macaques after administration of a second booster dose of an immunogenic composition comprising the SARS-CoV 2 S glycoprotein of SEQ ID NO: 329.

### Enumerated Embodiments of the Disclosure

[0430] Specific enumerated embodiments <1> to <199> provided below are for illustration purposes only, and do not otherwise limit the scope of the disclosed subject matter, as defined by the claims. These enumerated embodiments encompass all combinations, sub-combinations, and multiply referenced (e.g., multiply dependent) combinations described therein.
[0431] 1. An immunogenic composition comprising a first CoV S glycoprotein having an amino acid sequence with at least 80%, at least 85%, at least 90%, at least 91%, at least 92%, at least 93%, at least 94%, at least 95%, at least 96%, at least 97%, at least 98%, at least 99%, or 100% identity to any of SEQ ID NOS: 329-333.
[0432] 2. The immunogenic composition of enumerated embodiment 1, wherein the first CoV S glycoprotein comprises an inactive furin cleavage site.
[0433] 3. The immunogenic composition of any one of enumerated embodiments 1 and 2, comprising from 0.1 μg to 25 μg, 0.1 μg to 10 μg, 0.001 μg to 10 μg, 0.001 μg to 25 μg, or from 0.1 μg to 5 μg of the first CoV S glycoprotoein.
[0434] 4. The immunogenic composition of enumerated embodiment 1, comprising a nanoparticle comprising the first CoV S glycoprotein and a non-ionic detergent core.
[0435] 5. The immunogenic composition of enumerated embodiment 4, wherein the non-ionic detergent is selected from the group consisting of polysorbate-20 (PS20), polysorbate-40 (PS40), polysorbate-60 (PS60), polysorbate-65 (PS65), and polysorbate-80 (PS80).
[0436] 6. The immunogenic composition of enumerated embodiment 1, further comprising an adjuvant and a pharmaceutically acceptable carrier.
[0437] 7. The immunogenic composition of enumerated embodiment 8, wherein the adjuvant is a saponin adjuvant.
[0438] 8. The immunogenic composition of enumerated embodiment 7, wherein the saponin adjuvant comprises at least two iscom particles, wherein:
   [0439] the first iscom particle comprises fraction A of Quillaja Saponaria Molina and not fraction C of Quillaja Saponaria Molina; and
   [0440] the second iscom particle comprises fraction C of Quillaja Saponaria Molina and not fraction A of Quillaja Saponaria Molina.
[0441] 9. The immunogenic composition of enumerated embodiment 8, wherein fraction A of Quillaja Saponaria Molina and fraction C of Quillaja Saponaria Molina account for about 85% by weight and about 15% by weight, respectively, of the sum of weights of fraction A of Quillaja Saponaria Molina and fraction C of Quillaja Saponaria Molina in the saponin adjuvant.
[0442] 10. The immunogenic composition of enumerated embodiment 8, wherein fraction A of Quillaja Saponaria Molina and fraction C of Quillaja Saponaria Molina account for about 92% by weight and about 8% by weight, respectively, of the sum of the weights of fraction A of Quillaja Saponaria Molina and fraction C of Quillaja Saponaria Molina in the saponin adjuvant.
[0443] 11. The immunogenic composition of enumerated embodiment 8, wherein fraction A of Quillaja Saponaria Molina accounts for at least about 85% by weight, and fraction C of Quillaja Saponaria Molina accounts for the remainder, respectively, of the sum of the weights of fraction A of Quillaja Saponaria Molina and fraction C of Quillaja Saponaria Molina in the saponin adjuvant.
[0444] 12. The immunogenic composition of enumerated embodiment 8, wherein fraction A of Quillaja Saponaria Molina accounts for 50-96% by weight and fraction C of Quillaja Saponaria Molina accounts for the remainder, respectively, of the sum of the weights of fraction A of Quillaja Saponaria Molina and fraction C of Quillaja Saponaria Molina in the saponin adjuvant.
[0445] 13. The immunogenic composition of enumerated embodiment 6, comprising from about 25 μg to about 100 μg of adjuvant.
[0446] 14. The immunogenic composition of enumerated embodiment 13, comprising about 50 μg or 75 μg of adjuvant.
[0447] 15. The immunogenic composition of enumerated embodiment 1, wherein the first CoV S glycoprotein comprises one or more modifications compared to SEQ ID NO: 329 at amino acid 59, 346, 456, 475 572, and 1087, wherein the one or more modifications are numbered according to SEQ ID NO:1.
[0448] 16. The immunogenic composition of enumerated embodiment 15, wherein:
[0449] (i) amino acid at 59 is phenylalanine or serine;
[0450] (ii) amino acid at 346 is arginine or threonine;
[0451] (iii) amino acid at 456 is phenylalanine or leucine;
[0452] (iv) amino acid at 475 is alanine or valine:
[0453] (v) amino acid at 572 is threonine or isoleucine; and
[0454] (vi) amino acid at 1087 is alanine or serine.
[0455] 17. The immunogenic composition of any of enumerated embodiments 1-16, wherein the immunogenic composition is contained in a syringe.
[0456] 18. A method of stimulating an immune response against SARS-COV-2 or a heterogeneous SARS-COV-2 strain thereof in a human comprising administering the immunogenic composition of any one of enumerated embodiments 1-16 to the human.
[0457] 19. A method of boosting an immune response against SARS-COV-2 or a heterogeneous SARS-COV-2 strain thereof in a human comprising administering:
   [0458] a first immunogenic composition comprising (a) one or more first SARS-COV-2 S glycoproteins having at least 80%, at least 81%, at least 82%, at least 83%, at least 84%, at least 85%, at least 86%, at least 87%, at least 88%, at least 89%, at least 90%, at least 91%, at least 92%, at least 93%, at least 94%, at least 95%, at least 96%, at least 97%, at least 98%, at least 99%, or 100% identity to SEQ ID NO: 329, and (b) a pharmaceutically acceptable buffer;
   [0459] wherein the immunogenic composition is administered after administration of another immunogenic composition intended to produce an immunogenic response against SARS-CoV-2 or a heterogeneous SARS-COV-2 strain thereof in the human.
[0460] 20. The method of enumerated embodiment 19, comprising administering a first dose of the first immunogenic composition at least 21 days after administration of the other immunogenic composition.
[0461] 21. The method of enumerated embodiment 20, comprising administering the first immunogenic composition at least 2, 3, 4, 5, 6, 7, 8, 9, 10, 11, 12, 13, 14, 15, 16, 17, 18, 19, 20, 21, 22, 23, or 24 months after administration of the other immunogenic composition.
[0462] 22. The method of any one of enumerated embodiments 19-21, comprising administering the first immunogenic composition from about 1 month to about 18 months, from about 6 months to about 18 months, from about 9 months to about 18 months, from about 12 months to about 15 months, or from about 12 months to about 18 months after administration of the other immunogenic composition.
[0463] 23. The method of any one of enumerated embodiments 19-22, wherein the other immunogenic composition comprises an mRNA encoding a SARS-Cov-2 Spike glycoprotein, a plasmid DNA encoding a SARS-Cov-2 Spike glycoprotein, a viral vector encoding a SARS-Cov-2 Spike glycoprotein, an inactivated SARS-COV-2 virus, or a protein subunit vaccine.
[0464] 24. The method of enumerated embodiment 23, wherein the protein subunit vaccine of the other immunogenic composition comprises at least one or more second SARS-COV-2 S glycoproteins having at least 80%, at least 81%, at least 82%, at least 83%, at least 84%, at least 85%, at least 86%, at least 87%, at least 88%, at least 89%, at least 90%, at least 91%, at least 92%, at least 93%, at least 94%, at least 95%, at least 96%, at least 97%, at least 98%, at least 99%, or 100% identity to any of SEQ ID NOS: 87, 260, 222, 227, 274, and 284, and 329.
[0465] 25. The method of enumerated embodiment 24, wherein the at least one or more second SARS-COV-2 S glycoproteins comprises at least two SARS-COV-2 S glycoproteins having at least 80%, at least 81%, at least 82%, at least 83%, at least 84%, at least 85%, at least 86%, at least 87%, at least 88%, at least 89%, at least 90%, at least 91%, at least 92%, at least 93%, at least 94%, at least 95%, at least 96%, at least 97%, at least 98%, at least 99%, or 100% identity to any of SEQ ID NOS: 87, 260, 222, 227, 274, and 284, and 329.
[0466] 26. A method of broadening an immune response against SARS-COV-2 or a heterogeneous SARS-COV-2 strain thereof in a human comprising administering:
   [0467] a first immunogenic composition comprising (a) one or more first SARS-COV-2 S glycoproteins having at least 80%, at least 81%, at least 82%, at least 83%, at least 84%, at least 85%, at least 86%, at least 87%, at least 88%, at least 89%, at least 90%, at least 91%, at least 92%, at least 93%, at least 94%, at least 95%, at least 96%, at least 97%, at least 98%, at least 99%, or 100% identity to SEQ ID NO: 329, and (b) a pharmaceutically acceptable buffer;
   [0468] wherein the immunogenic composition is administered after administration of another immunogenic composition intended to produce an immunogenic response against SARS-CoV-2 or a heterogeneous SARS-COV-2 strain thereof in the human, the other immunogenic composition being free of a SARS-COV-2 S glycoprotein having at least 80%, at least 81%, at least 82%, at least 83%, at least 84%, at least 85%, at least 86%, at least 87%, at least 88%, at least 89%, at least 90%, at least 91%, at least 92%, at least 93%, at least 94%, at least 95%, at least 96%, at least 97%, at least 98%, at least 99%, or 100% identity to SEQ ID NO: 329.
[0469] 27. The method of enumerated embodiment 26, wherein the other immunogenic composition comprises one of an mRNA vaccine and a protein subunit vaccine.
[0470] 28. The method of enumerated embodiment 27, wherein the other immunogenic composition comprises a second CoV S glycoprotein having at least 80%, at least 81%, at least 82%, at least 83%, at least 84%, at least 85%, at least 86%, at least 87%, at least 88%, at least 89%, at least 90%, at least 91%, at least 92%, at least 93%, at least 94%, at least 95%, at least 96%, at least 97%, at least 98%, at least 99%, or 100% identity to any one of SEQ ID NOS: 87, 260, 222, 227, 274, and 284.
[0471] 29. A method of inducing an immune response against SARS-COV-2 or a heterogeneous SARS-COV-2 strain thereof in a human comprising administering:
   [0472] a first immunogenic composition comprising (a) one or more first SARS-COV-2 S glycoproteins having at least 80%, at least 81%, at least 82%, at least 83%, at least 84%, at least 85%, at least 86%, at least 87%, at least 88%, at least 89%, at least 90%, at least 91%, at least 92%, at least 93%, at least 94%, at least 95%, at least 96%, at least 97%, at least 98%, at least 99%, or 100% identity to SEQ ID NO: 329, and (b) a pharmaceutically acceptable buffer
[0473] 30. A method as recited in enumerated embodiment 29, further comprising administering a second immunogenic composition, comprising (a) one or more second SARS-COV-2 S glycoproteins having at least 80%, at least 81%, at least 82%, at least 83%, at least 84%, at least 85%, at least 86%, at least 87%, at least 88%, at least 89%, at least 90%, at least 91%, at least 92%, at least 93%, at least 94%, at least 95%, at least 96%, at least 97%, at least 98%, at least 99%, or 100% identity to any of SEQ ID NOS: 87, 260, 222, 227, 274, and 284, and 329.
[0474] 31. The method of enumerated embodiment 30, comprising administering the second immunogenic composition at least 21 days after administration of the first immunogenic composition.
[0475] 32. The method of enumerated embodiment 31, comprising administering the second immunogenic composition at least 2, 3, 4, 5, 6, 7, 8, 9, 10, 11, 12, 13, 14, 15, 16, 17, 18, 19, 20, 21, 22, 23, or 24 months after administration of the first immunogenic composition.
[0476] 33. The method of any one of enumerated embodiments 30-32, comprising administering the second immunogenic composition from about 1 month to about 18 months, from about 6 months to about 18 months, from about 9 months to about 18 months, from about 12 months to about 15 months, or from about 12 months to about 18 months after administration of the first immunogenic composition.
[0477] 34. An immunogenic composition comprising:
   [0478] (i) a first coronavirus spike (CoV S) glycoprotein;
   [0479] (ii) a second CoV S glycoprotein comprising from 1 to about 2, from 1 to about 3, from 1 to about 4, from 1 to about 5, from 2 to about 5, from 1 to about 6, from 1 to about 7, from 1 to about 8, from 1 to about 9, from 1 to about 10, from 1 to about 11, from 1 to about 12, from 1 to about 13, from 1 to about 14, from 1 to about 15, from 1 to about 16, from 1 to about 17, from 1 to about 18, from 1 to about 18, from 1 to about 19, or from 1 to about 20, from 1 to about 25, from 1 to about 30, from 1 to about 35, from 1 to about 40, from 1 to about 45, or from 1 to about 50 modifications compared to the first CoV S glycoprotein; and
   [0480] (iii) a third CoV S glycoprotein comprising from 1 to about 2, from 1 to about 3, from 1 to about 4, from 1 to about 5, from 2 to about 5, from 1 to about 6, from 1 to about 7, from 1 to about 8, from 1 to about 9, from 1 to about 10, from 1 to about 11, from 1 to about 12, from 1 to about 13, from 1 to about 14, from 1 to about 15, from 1 to about 16, from 1 to about 17, from 1 to about 18, from 1 to about 18, from 1 to about 19, or from 1 to about 20, from 1 to about 25, from 1 to about 30, from 1 to about 35, from 1 to about 40, from 1 to about 45, or from 1 to about 50 modifications compared to the first CoV S glycoprotein;
   [0481] wherein the second and third CoV S glycoproteins have different amino acid sequences.
[0482] 35. The immunogenic composition of enumerated embodiment 34, wherein the first CoV S glycoprotein contains an inactive furin cleavage site and mutations of amino acids 973 and 974, wherein the amino acid sequence of the CoV S glycoprotein is numbered according to SEQ ID NO: 2.
[0483] 36. The immunogenic composition of enumerated embodiment 34 or 35, comprising a fourth CoV S glycoprotein comprising from 1 to about 2, from 1 to about 3, from 1 to about 4, from 1 to about 5, from 2 to about 5, from 1 to about 6, from 1 to about 7, from 1 to about 8, from 1 to about 9, from 1 to about 10, from 1 to about 11, from 1 to about 12, from 1 to about 13, from 1 to about 14, from 1 to about 15, from 1 to about 16, from 1 to about 17, from 1 to about 18, from 1 to about 18, from 1 to about 19, or from 1 to about 20, from 1 to about 25, from 1 to about 30, from 1 to about 35, from 1 to about 40, from 1 to about 45, or from 1 to about 50 modifications compared to the first CoV S glycoprotein;
[0484] wherein the second, third, and fourth CoV S glycoproteins have different amino acid sequences.
[0485] 37. The immunogenic composition of any one of enumerated embodiments 34-36, comprising a fifth CoV S glycoprotein comprising from 1 to about 2, from 1 to about 3, from 1 to about 4, from 1 to about 5, from 2 to about 5, from 1 to about 6, from 1 to about 7, from 1 to about 8, from 1 to about 9, from 1 to about 10, from 1 to about 11, from 1 to about 12, from 1 to about 13, from 1 to about 14, from 1 to about 15, from 1 to about 16, from 1 to about 17, from 1 to about 18, from 1 to about 18, from 1 to about 19, or from 1 to about 20, from 1 to about 25, from 1 to about 30, from 1 to about 35, from 1 to about 40, from 1 to about 45, or from 1 to about 50 modifications compared to the first CoV S glycoprotein;
   [0486] wherein the second, third, fourth, and fifth CoV S glycoproteins have different amino acid sequences.
[0487] 38. The immunogenic composition of any one of enumerated embodiments 34-37, wherein one or more of the second, third, fourth, and fifth CoV S glycoproteins comprise modifications in the receptor binding domain (RBD).
[0488] 39. The immunogenic composition of any one of enumerated embodiments 34-37, wherein one or more of the second, third, fourth, and fifth CoV S glycoproteins comprise one or more modifications in the S1 subunit.
[0489] 40. The immunogenic composition of any one of enumerated embodiments 34-39, wherein one or more of the second, third, fourth, and fifth CoV S glycoproteins comprise one or more modifications in the S2 subunit.
[0490] 41. The immunogenic composition of any one of enumerated embodiments 34-40, wherein one or more of the second, third, fourth, and fifth CoV S glycoproteins comprise one or more modifications in the N-terminal domain (NTD).
[0491] 42. The immunogenic composition of any one of enumerated embodiments 34-41, wherein one or more of the second, third, fourth, and fifth CoV S glycoproteins comprise one or more modifications to any one of amino acids 630-710, any one of amino acids 640-700, any one of amino acids 650-690, or any one of amino acids 660-680, wherein the amino acids are numbered according to SEQ ID NO: 2.
[0492] 43. The immunogenic composition of any one of enumerated embodiments 35-42, wherein the inactive furin cleavage site of the first CoV S glycoprotein comprises the amino acid sequence of QQAQ (SEQ ID NO: 7) and wherein amino acids 973 and 974 are proline.
[0493] 44. The immunogenic composition of any one of enumerated embodiments 34-43, wherein one or more of the second, third, fourth, or fifth CoV S glycoprotein comprise an inactive furin cleavage site and mutations of amino acids 973 and 974, wherein the amino acid sequences of the second, third, fourth, and fifth CoV S glycoproteins are numbered according to SEQ ID NO: 2, optionally wherein, the inactive furin cleavage site comprises the amino acid sequence of QQAQ (SEQ ID NO: 7) and wherein amino acids 973 and 974 are proline.
[0494] 45. The immunogenic composition of any one of enumerated embodiments 34-44, wherein the first CoV S glycoprotein comprises an amino acid sequence that is at least 90%, at least 91%, at least 92%, at least 93%, at least 94%, at least 95%, at least 96%, at least 97%, at least 98%, at least 99%, at least 99.1%, at least 99.2%, at least 99.3%, at least 99.4%, at least 95%, at least 96%, at least 97%, at least 98%, at least 99% identical to any one of SEQ ID NOS: 86, 87, 88, 89, 105, 106, 109, 110, 112, 113, 115, 130, 132-134, 140-141, 143-144, 146, 147, 149, 151-153, 155-158, 174, 175, 186, 188, 190, 195, 217-228, 233-236, 243, and 245-292.
[0495] 46. The immunogenic composition of any one of enumerated embodiments 34-45, wherein the first CoV S glycoprotein comprises an amino acid sequence that is at least 90%, at least 91%, at least 92%, at least 93%, at least 94%, at least 95%, at least 96%, at least 97%, at least 98%, at least 99%, at least 99.1%, at least 99.2%, at least 99.3%, at least 99.4%, at least 95%, at least 96%, at least 97%, at least 98%, at least 99% identical to any one of SEQ ID NOS: 86, 87, 88, 89, 105, 106, 109, 110, 112, 113, 115, 130, 132-134, 140-141, 143-144, 146, 147, 149, 151-153, 155-158, 174, 175, 186, 188, 190, 195, 217-228, 233-236, 243, and 245-292.
[0496] 47. The immunogenic composition of any one of enumerated embodiments 34-46, wherein the second CoV S glycoprotein comprises an amino acid sequence that is at least 90%, at least 91%, at least 92%, at least 93%, at least 94%, at least 95%, at least 96%, at least 97%, at least 98%, at least 99%, at least 99.1%, at least 99.2%, at least 99.3%, at least 99.4%, at least 95%, at least 96%, at least 97%, at least 98%, at least 99% identical to any one of SEQ ID NOS: 86, 87, 88, 89, 105, 106, 109, 110, 112, 113, 115, 130, 132-134, 140-141, 143-144, 146, 147, 149, 151-153, 155-158, 174, 175, 186, 188, 190, 195, 217-228, 233-236, 243, and 245-292.
[0497] 48. The immunogenic composition of any one of enumerated embodiments 34-47, wherein the third CoV S glycoprotein comprises an amino acid sequence that is at least 90%, at least 91%, at least 92%, at least 93%, at least 94%, at least 95%, at least 96%, at least 97%, at least 98%, at least 99%, at least 99.1%, at least 99.2%, at least 99.3%, at least 99.4%, at least 95%, at least 96%, at least 97%, at least 98%, at least 99% identical to any one of SEQ ID NOS: 86, 87, 88, 89, 105, 106, 109, 110, 112, 113, 115, 130, 132-134, 140-141, 143-144, 146, 147, 149, 151-153, 155-158, 174, 175, 186, 188, 190, 195, 217-228, 233-236, 243, and 245-292.
[0498] 49. The immunogenic composition of any one of enumerated embodiments 36-48, wherein the fourth CoV S glycoprotein comprises an amino acid sequence that is at least 90%, at least 91%, at least 92%, at least 93%, at least 94%, at least 95%, at least 96%, at least 97%, at least 98%, at least 99%, at least 99.1%, at least 99.2%, at least 99.3%, at least 99.4%, at least 95%, at least 96%, at least 97%, at least 98%, at least 99% identical to any one of SEQ ID NOS: 86, 87, 88, 89, 105, 106, 109, 110, 112, 113, 115, 130, 132-134, 140-141, 143-144, 146, 147, 149, 151-153, 155-158, 174, 175, 186, 188, 190, 195, 217-228, 233-236, 243, and 245-292.
[0499] 50. The immunogenic composition of any one of enumerated embodiments 37-49, wherein the fifth CoV S glycoprotein comprises an amino acid sequence that is at least 90%, at least 91%, at least 92%, at least 93%, at least 94%, at least 95%, at least 96%, at least 97%, at least 98%, at least 99%, at least 99.1%, at least 99.2%, at least 99.3%, at least 99.4%, at least 95%, at least 96%, at least 97%, at least 98%, at least 99% identical to any one of SEQ ID NOS: 86, 87, 88, 89, 105, 106, 109, 110, 112, 113, 115, 130, 132-134, 140-141, 143-144, 146, 147, 149, 151-153, 155-158, 174, 175, 186, 188, 190, 195, 217-228, 233-236, 243, and 245-292.
[0500] 51. The immunogenic composition of any one of enumerated embodiments 37-50, wherein each of the second, third, fourth, and fifth CoV S glycoproteins comprise one modification in the RBD compared to the first CoV S glycoprotein.
[0501] 52. The immunogenic composition of enumerated embodiment 51, wherein the modification in the RBD is one or more of a P508S mutation, a K431T mutation, a F473S mutation, or a T465K mutation, wherein the amino acid sequence of each CoV S glycoprotein is numbered according to SEQ ID NO: 2.
[0502] 53. The immunogenic composition of any one of enumerated embodiments 34-52, comprising from about 3 μg to about 7 μg of the first CoV S glycoprotein.
[0503] 54. The immunogenic composition of any one of enumerated embodiments 34-53, comprising from about 1 ng to about 1 μg or from about 3 μg to about 7 μg of the second CoV S glycoprotein.
[0504] 55. The immunogenic composition of any one of enumerated embodiments 34-54, comprising from about 1 ng to about 1 μg or from about 3 μg to about 7 μg of the third CoV S glycoprotein.
[0505] 56. The immunogenic composition of any one of enumerated embodiments 37-53, comprising from about 1 ng to about 1 μg or from about 3 μg to about 7 μg of the fourth CoV S glycoprotein.
[0506] 57. The immunogenic composition of any one of enumerated embodiments 37-53, comprising from about 1 ng to about 1 μg or from about 3 μg to about 7 μg of the fifth CoV S glycoprotein.
[0507] 58. An immunogenic composition comprising:
   [0508] (i) a first nanoparticle comprising a first CoV S glycoprotein;
   [0509] (ii) a second nanoparticle comprising a second CoV S glycoprotein and a third CoV S glycoprotein, wherein each of the second CoV S glycoprotein and the third CoV S glycoprotein comprise from 1 to about 2, from 1 to about 3, from 1 to about 4, from 1 to about 5, from 2 to about 5, from 1 to about 6, from 1 to about 7, from 1 to about 8, from 1 to about 9, from 1 to about 10, from 1 to about 11, from 1 to about 12, from 1 to about 13, from 1 to about 14, from 1 to about 15, from 1 to about 16, from 1 to about 17, from 1 to about 18, from 1 to about 18, from 1 to about 19, or from 1 to about 20, from 1 to about 25, from 1 to about 30, from 1 to about 35, from 1 to about 40, from 1 to about 45, or from 1 to about 50 modifications compared to the first CoV S glycoprotein.
[0510] 59. The immunogenic composition of enumerated embodiment 25, wherein the first CoV S glycoprotein contains an inactive furin cleavage site and mutations of amino acids 973 and 974, wherein the amino acid sequence of the CoV S glycoprotein is numbered according to SEQ ID NO: 2.
[0511] 60. The immunogenic composition of enumerated embodiment 58 or 59, comprising a fourth CoV S glycoprotein comprising from 1 to about 2, from 1 to about 3, from 1 to about 4, from 1 to about 5, from 2 to about 5, from 1 to about 6, from 1 to about 7, from 1 to about 8, from 1 to about 9, from 1 to about 10, from 1 to about 11, from 1 to about 12, from 1 to about 13, from 1 to about 14, from 1 to about 15, from 1 to about 16, from 1 to about 17, from 1 to about 18, from 1 to about 18, from 1 to about 19, or from 1 to about 20, from 1 to about 25, from 1 to about 30, from 1 to about 35, from 1 to about 40, from 1 to about 45, or from 1 to about 50 modifications compared to the first CoV S glycoprotein;
   [0512] wherein the second, third, and fourth CoV S glycoproteins have different amino acid sequences.
[0513] 61. The immunogenic composition of any one of enumerated embodiments 58-60, comprising a fifth CoV S glycoprotein comprising from 1 to about 2, from 1 to about 3, from 1 to about 4, from 1 to about 5, from 2 to about 5, from 1 to about 6, from 1 to about 7, from 1 to about 8, from 1 to about 9, from 1 to about 10, from 1 to about 11, from 1 to about 12, from 1 to about 13, from 1 to about 14, from 1 to about 15, from 1 to about 16, from 1 to about 17, from 1 to about 18, from 1 to about 18, from 1 to about 19, or from 1 to about 20, from 1 to about 25, from 1 to about 30, from 1 to about 35, from 1 to about 40, from 1 to about 45, or from 1 to about 50 modifications compared to the first CoV S glycoprotein;
   [0514] wherein the second, third, fourth, and fifth CoV S glycoproteins have different amino acid sequences.
[0515] 62. The immunogenic composition of any one of enumerated embodiments 58-61, wherein one or more of the second, third, fourth, and fifth CoV S glycoproteins comprise modifications in the receptor binding domain (RBD).
[0516] 63. The immunogenic composition of any one of enumerated embodiments 58-62, wherein one or more of the second, third, fourth, and fifth CoV S glycoproteins comprise one or more modifications in the S1 subunit.
[0517] 64. The immunogenic composition of any one of enumerated embodiments 58-63, wherein one or more of the second, third, fourth, and fifth CoV S glycoproteins comprise one or more modifications in the S2 subunit.
[0518] 65. The immunogenic composition of any one of enumerated embodiments 58-64, wherein one or more of the second, third, fourth, and fifth CoV S glycoproteins comprise one or more modifications in the N-terminal domain (NTD).
[0519] 66. The immunogenic composition of any one of enumerated embodiments 58-65, wherein one or more of the second, third, fourth, and fifth CoV S glycoproteins comprise one or more modifications to any one of amino acids 630-710, any one of amino acids 640-700, any one of amino acids 650-690, or any one of amino acids 660-680, wherein the amino acids are numbered according to SEQ ID NO: 2.
[0520] 67. The immunogenic composition of any one of enumerated embodiments 59-66, wherein the inactive furin cleavage site of the first CoV S glycoprotein comprises the amino acid sequence of QQAQ (SEQ ID NO: 7) and wherein amino acids 973 and 974 are proline.
[0521] 68. The immunogenic composition of any one of enumerated embodiments 58-67, wherein one or more of the second, third, fourth, or fifth CoV S glycoprotein comprise an inactive furin cleavage site and mutations of amino acids 973 and 974, wherein the amino acid sequences of the second, third, fourth, and fifth CoV S glycoproteins are numbered according to SEQ ID NO: 2.
[0522] 69. The immunogenic composition of enumerated embodiment 68, wherein the inactive furin cleavage site comprises the amino acid sequence of QQAQ (SEQ ID NO: 7) and wherein amino acids 973 and 974 are proline.
[0523] 70. The immunogenic composition of any one of enumerated embodiments 58-69, wherein the first CoV S glycoprotein comprises an amino acid sequence that is at least 90%, at least 91%, at least 92%, at least 93%, at least 94%, at least 95%, at least 96%, at least 97%, at least 98%, at least 99%, at least 99.1%, at least 99.2%, at least 99.3%, at least 99.4%, at least 95%, at least 96%, at least 97%, at least 98%, at least 99% identical to any one of SEQ ID NOS: 86, 87, 88, 89, 105, 106, 109, 110, 112, 113, 115, 130, 132-134, 140-141, 143-144, 146, 147, 149, 151-153, 155-158, 174, 175, 186, 188, 190, 195, 217-228, 233-236, 243, and 245-292.
[0524] 71. The immunogenic composition of any one of enumerated embodiments 58-70, wherein the first CoV S glycoprotein comprises an amino acid sequence that is at least 90%, at least 91%, at least 92%, at least 93%, at least 94%, at least 95%, at least 96%, at least 97%, at least 98%, at least 99%, at least 99.1%, at least 99.2%, at least 99.3%, at least 99.4%, at least 95%, at least 96%, at least 97%, at least 98%, at least 99% identical to any one of SEQ ID NOS: 245, 250, 255, and 260.
[0525] 72. The immunogenic composition of any one of enumerated embodiments 58-71, wherein the second CoV S glycoprotein comprises an amino acid sequence that is at least 90%, at least 91%, at least 92%, at least 93%, at least 94%, at least 95%, at least 96%, at least 97%, at least 98%, at least 99%, at least 99.1%, at least 99.2%, at least 99.3%, at least 99.4%, at least 95%, at least 96%, at least 97%, at least 98%, at least 99% identical to any one of SEQ ID NOS: 246, 251, 256, and 261.
[0526] 73. The immunogenic composition of any one of enumerated embodiments 58-72, wherein the third CoV S glycoprotein comprises an amino acid sequence that is at least 90%, at least 91%, at least 92%, at least 93%, at least 94%, at least 95%, at least 96%, at least 97%, at least 98%, at least 99%, at least 99.1%, at least 99.2%, at least 99.3%, at least 99.4%, at least 95%, at least 96%, at least 97%, at least 98%, at least 99% identical to any one of SEQ ID NOS: 247, 252, 257, and 262.
[0527] 74. The immunogenic composition of any one of enumerated embodiments 60-73, wherein the fourth CoV S glycoprotein comprises an amino acid sequence that is at least 90%, at least 91%, at least 92%, at least 93%, at least 94%, at least 95%, at least 96%, at least 97%, at least 98%, at least 99%, at least 99.1%, at least 99.2%, at least 99.3%, at least 99.4%, at least 95%, at least 96%, at least 97%, at least 98%, at least 99% identical to any one of SEQ ID NOS: 248, 253, 258, and 263.
[0528] 75. The immunogenic composition of any one of enumerated embodiments 61-74, wherein the fifth CoV S glycoprotein comprises an amino acid sequence that is at least 90%, at least 91%, at least 92%, at least 93%, at least 94%, at least 95%, at least 96%, at least 97%, at least 98%, at least 99%, at least 99.1%, at least 99.2%, at least 99.3%, at least 99.4%, at least 95%, at least 96%, at least 97%, at least 98%, at least 99% identical to any one of SEQ ID NOS: 249, 254, 259, and 264.
[0529] 76. The immunogenic composition of any one of enumerated embodiments 61-75, wherein each of the second, third, fourth, and fifth CoV S glycoproteins comprise one modification in the RBD compared to the first CoV S glycoprotein.
[0530] 77. The immunogenic composition of enumerated embodiment 76, wherein the modification is one or more of a P508S mutation, a K431T mutation, a F473S mutation, or a T465K mutation, wherein the amino acid sequence of each CoV S glycoprotein is numbered according to SEQ ID NO: 2
[0531] 78. The immunogenic composition of any one of enumerated embodiments 58-77, comprising from about 3 μg to about 7 μg of the first CoV S glycoprotein.
[0532] 79. The immunogenic composition of any one of enumerated embodiments 58-78, comprising from about 1 ng to about 1 μg or from about 3 μg to about 7 μg of the second CoV S glycoprotein.
[0533] 80. The immunogenic composition of any one of enumerated embodiments 58-79, comprising from about 1 ng to about 1 μg or from about 3 μg to about 7 μg of the third CoV S glycoprotein.
[0534] 81. The immunogenic composition of any one of enumerated embodiments 60-80, comprising from about 1 ng to about 1 μg or from about 3 μg to about 7 μg of the fourth CoV S glycoprotein.
[0535] 82. The immunogenic composition of any one of enumerated embodiments 61-81, comprising from about 1 ng to about 1 μg or from about 3 μg to about 7 μg of the fifth CoV S glycoprotein.
[0536] 83. The immunogenic composition of any one of enumerated embodiments 58-82, comprising a pharmaceutically acceptable buffer.
[0537] 84. The immunogenic composition of any one of enumerated embodiments 58-83, comprising an adjuvant.
[0538] 85. The immunogenic composition of enumerated embodiment 84, wherein the adjuvant is a saponin adjuvant.
[0539] 86. The immunogenic composition of enumerated embodiment 85, wherein the saponin adjuvant comprises at least two iscom particles, wherein:
   [0540] the first iscom particle comprises fraction A of Quillaja Saponaria Molina and not fraction C of Quillaja Saponaria Molina; and
   [0541] the second iscom particle comprises fraction C of Quillaja Saponaria Molina and not fraction A of Quillaja Saponaria Molina.
[0542] 87. The immunogenic composition of enumerated embodiment 86, wherein:
   [0543] fraction A of Quillaja Saponaria Molina and fraction C of Quillaja Saponaria Molina account for about 85% by weight and about 15% by weight, respectively, of the sum of weights of fraction A of Quillaja Saponaria Molina and fraction C of Quillaja Saponaria Molina in the saponin adjuvant.
[0544] 88. The immunogenic composition of enumerated embodiment 86, wherein fraction A of Quillaja Saponaria Molina and fraction C of Quillaja Saponaria Molina account for about 92% by weight and about 8% by weight, respectively, of the sum of the weights of fraction A of Quillaja Saponaria Molina and fraction C of Quillaja Saponaria Molina in the saponin adjuvant.
[0545] 89. The immunogenic composition of enumerated embodiment 86, wherein fraction A of Quillaja Saponaria Molina accounts for at least about 85% by weight, and fraction C of Quillaja Saponaria Molina accounts for the remainder, respectively, of the sum of the weights of fraction A of Quillaja Saponaria Molina and fraction C of Quillaja Saponaria Molina in the saponin adjuvant.
[0546] 90. The immunogenic composition of enumerated embodiment 86, wherein fraction A of Quillaja Saponaria Molina accounts for 50-96% by weight and fraction C of Quillaja Saponaria Molina accounts for the remainder, respectively, of the sum of the weights of fraction A of Quillaja Saponaria Molina and fraction C of Quillaja Saponaria Molina in the saponin adjuvant.
[0547] 91. The immunogenic composition of any one of enumerated embodiments 84-90, comprising from about 25 μg to about 100 μg of adjuvant.
[0548] 92. The immunogenic composition of any one of enumerated embodiments 84-90, comprising about 50 μg of adjuvant.
[0549] 93. The immunogenic composition of any one of enumerated embodiments 1-92, comprising an mRNA encoding a SARS-Cov-2 Spike glycoprotein, a plasmid DNA encoding a SARS-Cov-2 Spike glycoprotein, a viral vector encoding a SARS-Cov-2 Spike glycoprotein, or an inactivated SARS-COV-2 virus.
[0550] 94. The immunogenic composition of any one of enumerated embodiments 1-93, comprising at least one, at least two, at least three, or at least four hemagglutinin (HA) glycoproteins, wherein each HA glycoprotein is from a different influenza strain.
[0551] 95. The immunogenic composition of any one of enumerated embodiments 1-94, comprising a respiratory syncytial virus (RSV) fusion (F) glycoprotein.
[0552] 96. The immunogenic composition of any one of enumerated embodiments 1-95, wherein the total amount of CoV S glycoprotein in the composition is from about 3 μg to about 10 μg.
[0553] 97. A pre-filled syringe comprising the immunogenic composition of any one of enumerated embodiments 34-96 and 125-196.
[0554] 98. A method of stimulating an immune response against SARS-COV-2 or a heterogeneous SARS-COV-2 strain comprising administering the immunogenic composition of any one of enumerated embodiments 1-17 and 34-96 and 125-196 to a subject.
[0555] 99. The method of enumerated embodiment 98, comprising administering 1, 2, 3, 4, 5, 6, 7, 8, 9, or 10 doses of the immunogenic composition.
[0556] 100. The method of enumerated embodiment 98 or 99, comprising administering a first dose of the immunogenic composition and a second dose of the immunogenic composition about three weeks after the first dose.
[0557] 101. The method of any one of enumerated embodiments 98-100, comprising administering a first dose of the immunogenic composition and a second dose of the immunogenic composition about 21 days after the first dose.
[0558] 102. The method of any one of enumerated embodiments 98-101, comprising administering at least three doses of the immunogenic composition, wherein the third dose of the immunogenic composition is administered at least 6 months, at least 7 months, at least 8 months, at least 9 months, at least 10 months, at least 11 months, at least 12 months, at least 13 months, at least 14 months, at least 15 months, at least 16 months, at least 17 months, at least 18 months, at least 19 months, at least 20 months, at least 21 months, at least 22 months, at least 23 months, or at least 24 months after the first or second dose.
[0559] 103. The method of any one of enumerated embodiments 98-102, comprising administering a second immunogenic composition that is different from the first immunogenic composition.
[0560] 104. The method of enumerated embodiment 103, wherein the second immunogenic composition comprises an mRNA encoding a SARS-Cov-2 Spike glycoprotein, a plasmid DNA encoding a SARS-Cov-2 Spike glycoprotein, a viral vector encoding a SARS-Cov-2 Spike glycoprotein, or an inactivated SARS-COV-2 virus.
[0561] 105. The method of enumerated embodiment 103, wherein the second immunogenic composition comprises at least one, at least two, at least three, or at least four hemagglutinin (HA) glycoproteins, wherein each HA glycoprotein is from a different influenza strain.
[0562] 106. The method of enumerated embodiment 103, wherein the second immunogenic composition comprises an RSV F glycoprotein.
[0563] 107. The method of enumerated embodiment 103, wherein the second immunogenic composition comprises a different CoV S glycoprotein than the first immunogenic composition.
[0564] 108. The method of any one of enumerated embodiments 98-107, wherein the immunogenic composition is administered intramuscularly.
[0565] 109. The method of any one of enumerated embodiments 98-108, comprising administering the immunogenic composition in a pre-filled syringe.
[0566] 110. The method of any one of enumerated embodiments 98-109, wherein the method prevents COVID-19 with an efficacy from about 50% to about 99%, from about 50% to about 95%, from about 50% to about 90%, from about 50% to about 85%, from about 50% to about 80%, from about 60% to about 99%, from about 65% to about 95%, from about 65% to about 90%, from about 65% to about 85%, from about 69% to about 81%, from about 60% to about 95%, from about 60% to about 90%, from about 60% to about 85%, from about 60% to about 80%, from about 40% to about 99%, from about 40% to about 95%, from about 40% to about 90%, from about 40% to about 85%, from about 40% to about 80%, from about 40% to about 75%, from about 40% to about 70%, from about 40% to about 65%, from about 40% to about 55%, or from about 40% to about 50% for at least about 2 months, at least about 2.5 months, at least about 3 months, at least about 3.5 months, at least about 4 months, at least about 4.5 months, at least about 5 months, at least about 5.5 months, at least about 6 months, at least about 6.5 months, at least about 7 months, at least about 7.5 months, at least about 8 months, at least about 8.5 months, at least about 9 months, at least about 9.5 months, at least about 10 months, at least about 10.5 months, at least about 11 months, at least about 11.5 months, at least about 12 months, at least 13 months, at least 14 months, at least 15 months, at least 16 months, at least 17 months, at least 18 months, at least 19 months, at least 20 months, at least 21 months, at least 22 months, at least 23 months, or at least 24 months after administration of the immunogenic composition.
[0567] 111. The method of any one of enumerated embodiments 98-110, wherein the method prevents COVID-19 with an efficacy from about 50% to about 99%, from about 50% to about 95%, from about 50% to about 90%, from about 50% to about 85%, from about 50% to about 80%, from about 60% to about 99%, from about 65% to about 95%, from about 65% to about 90%, from about 65% to about 85%, from about 69% to about 81%, from about 60% to about 95%, from about 60% to about 90%, from about 60% to about 85%, from about 60% to about 80%, from about 40% to about 99%, from about 40% to about 95%, from about 40% to about 90%, from about 40% to about 85%, from about 40% to about 80%, from about 40% to about 75%, from about 40% to about 70%, from about 40% to about 65%, from about 40% to about 55%, or from about 40% to about 50% for up to about 2 months, up to about 2.5 months, up to about 3 months, up to about 3.5 months, up to about 4 months, up to about 4.5 months, up to about 5 months, up to about 5.5 months, up to about 6 months, up to about 6.5 months, up to about 7 months, up to about 7.5 months, up to about 8 months, up to about 8.5 months, up to about 9 months, up to about 9.5 months, up to about 10 months, up to about 10.5 months, up to about 11 months, up to about 11.5 months, up to about 12 months, up to 13 months, up to 14 months, up to 15 months, up to 16 months, up to 17 months, up to 18 months, up to 19 months, up to 20 months, up to 21 months, up to 22 months, up to 23 months, or up to 24 months after administration of the immunogenic composition.
[0568] 112. A method of stimulating an immune response against SARS-COV-2, a heterogeneous SARS-COV-2 strain, an influenza virus, or a combination thereof in a subject comprising administering the immunogenic composition of enumerated embodiment 94.
[0569] 113. A method of stimulating an immune response against SARS-COV-2, a heterogeneous SARS-COV-2 strain, an influenza virus, respiratory syncytial virus (RSV) or a combination thereof in a subject comprising administering the immunogenic composition of enumerated embodiment 95.
[0570] 114. A method of preparing an COV S nanoparticle, comprising the steps of:
   [0571] (i) binding a protein extract, wherein the protein extract comprises a first detergent and a first CoV S glycoprotein, to a protein purification column, wherein the column binds the CoV S glycoprotein;
   [0572] (ii) performing a detergent exchange by substantially replacing the first detergent with a second detergent; and
   [0573] (iii) eluting the bound CoV S glycoprotein from the column in the presence of the second detergent to provide the nanoparticle.
[0574] 115. The method of enumerated embodiment 114, wherein the protein extract further comprises a second CoV S glycoprotein, wherein the second CoV S glycoprotein comprises from 1 to about 2, from 1 to about 3, from 1 to about 4, from 1 to about 5, from 2 to about 5, from 1 to about 6, from 1 to about 7, from 1 to about 8, from 1 to about 9, from 1 to about 10, from 1 to about 11, from 1 to about 12, from 1 to about 13, from 1 to about 14, from 1 to about 15, from 1 to about 16, from 1 to about 17, from 1 to about 18, from 1 to about 18, from 1 to about 19, or from 1 to about 20, from 1 to about 25, from 1 to about 30, from 1 to about 35, from 1 to about 40, from 1 to about 45, or from 1 to about 50 modifications compared to the first CoV S glycoprotein.
[0575] 116. The method of enumerated embodiment 115, wherein the protein extract further comprises a third CoV S glycoprotein, wherein the third CoV S glycoprotein comprises from 1 to about 2, from 1 to about 3, from 1 to about 4, from 1 to about 5, from 2 to about 5, from 1 to about 6, from 1 to about 7, from 1 to about 8, from 1 to about 9, from 1 to about 10, from 1 to about 11, from 1 to about 12, from 1 to about 13, from 1 to about 14, from 1 to about 15, from 1 to about 16, from 1 to about 17, from 1 to about 18, from 1 to about 18, from 1 to about 19, or from 1 to about 20, from 1 to about 25, from 1 to about 30, from 1 to about 35, from 1 to about 40, from 1 to about 45, or from 1 to about 50 modifications compared to the first CoV S glycoprotein.
[0576] 117. The method of enumerated embodiment 116, wherein the protein extract further comprises a fourth CoV S glycoprotein, wherein the fourth CoV S glycoprotein comprises from 1 to about 2, from 1 to about 3, from 1 to about 4, from 1 to about 5, from 2 to about 5, from 1 to about 6, from 1 to about 7, from 1 to about 8, from 1 to about 9, from 1 to about 10, from 1 to about 11, from 1 to about 12, from 1 to about 13, from 1 to about 14, from 1 to about 15, from 1 to about 16, from 1 to about 17, from 1 to about 18, from 1 to about 18, from 1 to about 19, or from 1 to about 20, from 1 to about 25, from 1 to about 30, from 1 to about 35, from 1 to about 40, from 1 to about 45, or from 1 to about 50 modifications compared to the first CoV S glycoprotein.
[0577] 118. The method of enumerated embodiment 117, wherein the protein extract further comprises a fifth CoV S glycoprotein, wherein the fifth CoV S glycoprotein comprises from 1 to about 2, from 1 to about 3, from 1 to about 4, from 1 to about 5, from 2 to about 5, from 1 to about 6, from 1 to about 7, from 1 to about 8, from 1 to about 9, from 1 to about 10, from 1 to about 11, from 1 to about 12, from 1 to about 13, from 1 to about 14, from 1 to about 15, from 1 to about 16, from 1 to about 17, from 1 to about 18, from 1 to about 18, from 1 to about 19, or from 1 to about 20, from 1 to about 25, from 1 to about 30, from 1 to about 35, from 1 to about 40, from 1 to about 45, or from 1 to about 50 modifications compared to the first CoV S glycoprotein.
[0578] 119. The method of any one of enumerated embodiments 114-118, wherein the protein extract is prepared by:
   [0579] (a) transforming a host cell with a nucleic acid encoding the first CoV S glycoprotein, wherein the glycoprotein comprises a transmembrane domain; and
   [0580] (b) culturing the host cell under conditions conducive to the production of the CoV S glycoprotein.
[0581] 120. The method of enumerated embodiment 119, comprising transforming the host cell with a nucleic acid encoding a second CoV S glycoprotein, wherein the second CoV S glycoprotein comprises a transmembrane domain and wherein the second CoV S glycoprotein comprises from 1 to about 2, from 1 to about 3, from 1 to about 4, from 1 to about 5, from 2 to about 5, from 1 to about 6, from 1 to about 7, from 1 to about 8, from 1 to about 9, from 1 to about 10, from 1 to about 11, from 1 to about 12, from 1 to about 13, from 1 to about 14, from 1 to about 15, from 1 to about 16, from 1 to about 17, from 1 to about 18, from 1 to about 18, from 1 to about 19, or from 1 to about 20, from 1 to about 25, from 1 to about 30, from 1 to about 35, from 1 to about 40, from 1 to about 45, or from 1 to about 50 modifications compared to the first CoV S glycoprotein.
[0582] 121. The method of enumerated embodiment 120, comprising transforming the host cell with a nucleic acid encoding a third CoV S glycoprotein, wherein the third CoV S glycoprotein comprises a transmembrane domain and wherein the third CoV S glycoprotein comprises from 1 to about 2, from 1 to about 3, from 1 to about 4, from 1 to about 5, from 2 to about 5, from 1 to about 6, from 1 to about 7, from 1 to about 8, from 1 to about 9, from 1 to about 10, from 1 to about 11, from 1 to about 12, from 1 to about 13, from 1 to about 14, from 1 to about 15, from 1 to about 16, from 1 to about 17, from 1 to about 18, from 1 to about 18, from 1 to about 19, or from 1 to about 20, from 1 to about 25, from 1 to about 30, from 1 to about 35, from 1 to about 40, from 1 to about 45, or from 1 to about 50 modifications compared to the first CoV S glycoprotein.
[0583] 122. The method of enumerated embodiment 121, comprising transforming the host cell with a nucleic acid encoding a fourth CoV S glycoprotein, wherein the fourth CoV S glycoprotein comprises a transmembrane domain and wherein the fourth CoV S glycoprotein comprises from 1 to about 2, from 1 to about 3, from 1 to about 4, from 1 to about 5, from 2 to about 5, from 1 to about 6, from 1 to about 7, from 1 to about 8, from 1 to about 9, from 1 to about 10, from 1 to about 11, from 1 to about 12, from 1 to about 13, from 1 to about 14, from 1 to about 15, from 1 to about 16, from 1 to about 17, from 1 to about 18, from 1 to about 18, from 1 to about 19, or from 1 to about 20, from 1 to about 25, from 1 to about 30, from 1 to about 35, from 1 to about 40, from 1 to about 45, or from 1 to about 50 modifications compared to the first CoV S glycoprotein.
[0584] 123. The method of enumerated embodiment 122, comprising transforming the host cell with a nucleic acid encoding a fifth CoV S glycoprotein, wherein the fifth CoV S glycoprotein comprises a transmembrane domain and wherein the fifth CoV S glycoprotein comprises from 1 to about 2, from 1 to about 3, from 1 to about 4, from 1 to about 5, from 2 to about 5, from 1 to about 6, from 1 to about 7, from 1 to about 8, from 1 to about 9, from 1 to about 10, from 1 to about 11, from 1 to about 12, from 1 to about 13, from 1 to about 14, from 1 to about 15, from 1 to about 16, from 1 to about 17, from 1 to about 18, from 1 to about 18, from 1 to about 19, or from 1 to about 20, from 1 to about 25, from 1 to about 30, from 1 to about 35, from 1 to about 40, from 1 to about 45, or from 1 to about 50 modifications compared to the first CoV S glycoprotein.
[0585] 124. The method of any one of enumerated embodiments 119-123, wherein the host cell is an insect cell, optionally wherein the insect cell is a Sf9 or Sf22a cell.
[0586] 125. An immunogenic composition comprising a first, second, third, fourth, and fifth CoV S glycoprotein.
[0587] 126. The immunogenic composition of enumerated embodiment 125, wherein the first CoV S glycoprotein has an amino acid sequence with at least 90%, at least 91%, at least 92%, at least 93%, at least 94%, at least 95%, at least 96%, at least 97%, at least 98%, at least 99%, or 100% identity to any one of SEQ ID NOS: 245, 250, 255, 260, 265, 269, 273, 274, 277, and 284.
[0588] 127. The immunogenic composition of enumerated embodiment 125 or 126, wherein the second, third, fourth, and fifth CoV S glycoprotein comprise from 1 to 60 modifications compared to the first CoV S glycoprotein.
[0589] 128. The immunogenic composition of enumerated embodiment 127, wherein the second, third, fourth, and fifth CoV S glycoproteins comprise from 1 to 10 modifications compared to the first CoV S glycoprotein.
[0590] 129. The immunogenic composition of enumerated embodiment 127 or 128, wherein the modifications occur at one or more of amino acids 180, 252, 253, 444, 478, 486, and 521, wherein the modifications are numbered according to a CoV S polypeptide having the amino acid sequence of SEQ ID NO: 1.
[0591] 130. The immunogenic composition of any one of enumerated embodiments 125-129 comprising from 0.1 μg to 10 μg of each CoV S polypeptide.
[0592] 131. The immunogenic composition of any one of enumerated embodiments 125-130, comprising from 0.1 μg to 10 μg of the first CoV S glycoprotein.
[0593] 132. The immunogenic composition of any one of enumerated embodiments 125-131, comprising from 0.1 μg to 5 μg of the first CoV S glycoprotein.
[0594] 133. The immunogenic composition of any one of enumerated embodiments 125-132, wherein the amount of the second CoV S glycoprotein in the composition is less than the amount of the first CoV S glycoprotein in the composition.
[0595] 134. The immunogenic composition of any one of enumerated embodiments 125-133, wherein the amount of the third CoV S glycoprotein in the composition is less than the amount of the first CoV S glycoprotein in the composition.
[0596] 135. The immunogenic composition of any one of enumerated embodiments 125-134, wherein the amount of the fourth CoV S glycoprotein in the composition is less than the amount of the first CoV S glycoprotein in the composition.
[0597] 136. The immunogenic composition of any one of enumerated embodiments 125-135, wherein the amount of the fifth CoV S glycoprotein in the composition is less than the amount of the first CoV S glycoprotein in the composition.
[0598] 137. The immunogenic composition of any one of enumerated embodiments 125-136, comprising an adjuvant.
[0599] 138. The immunogenic composition of enumerated embodiment 137, wherein the adjuvant is a saponin adjuvant.
[0600] 139. The immunogenic composition of enumerated embodiment 138, wherein the saponin adjuvant comprises at least two iscom particles, wherein:
   [0601] the first iscom particle comprises fraction A of Quillaja Saponaria Molina and not fraction C of Quillaja Saponaria Molina; and
   [0602] the second iscom particle comprises fraction C of Quillaja Saponaria Molina and not fraction A of Quillaja Saponaria Molina.
[0603] 140. The immunogenic composition of enumerated embodiment 139, wherein fraction A of Quillaja Saponaria Molina and fraction C of Quillaja Saponaria Molina account for about 85% by weight and about 15% by weight, respectively, of the sum of weights of fraction A of Quillaja Saponaria Molina and fraction C of Quillaja Saponaria Molina in the saponin adjuvant.
[0604] 141. The immunogenic composition of enumerated embodiment 139, wherein fraction A of Quillaja Saponaria Molina and fraction C of Quillaja Saponaria Molina account for about 92% by weight and about 8% by weight, respectively, of the sum of the weights of fraction A of Quillaja Saponaria Molina and fraction C of Quillaja Saponaria Molina in the saponin adjuvant.
[0605] 142. The immunogenic composition of enumerated embodiment 139, wherein fraction A of Quillaja Saponaria Molina accounts for at least about 85% by weight, and fraction C of Quillaja Saponaria Molina accounts for the remainder, respectively, of the sum of the weights of fraction A of Quillaja Saponaria Molina and fraction C of Quillaja Saponaria Molina in the saponin adjuvant.
[0606] 143. The immunogenic composition of enumerated embodiment 139, wherein fraction A of Quillaja Saponaria Molina accounts for 50-96% by weight and fraction C of Quillaja Saponaria Molina accounts for the remainder, respectively, of the sum of the weights of fraction A of Quillaja Saponaria Molina and fraction C of Quillaja Saponaria Molina in the saponin adjuvant.
[0607] 144. The immunogenic composition of any one of enumerated embodiments 137-143, comprising from about 25 μg to about 100 μg of adjuvant.
[0608] 145. The immunogenic composition of any one of enumerated embodiments 137-144, comprising about 50 μg of adjuvant.
[0609] 146. The immunogenic composition of any one of enumerated embodiments 139-1145, wherein the second, third, fourth, or fifth CoV S glycoprotein comprises one or more modifications compared to the first CoV S glycoprotein at amino acid 180, 252, 253, 444, 478, 486, or 521, wherein the one or more modifications are numbered according to a CoV S glycoprotein of SEQ ID NO: 1.
[0610] 147. The immunogenic composition of enumerated embodiment 146, wherein:
[0611] (i) amino acid 180 is glutamate or valine;
[0612] (ii) amino acid 252 is glycine or valine;
[0613] (iii) amino acid 253 is aspartate or glycine;
[0614] (iv) amino acid 444 is lysine or threonine;
[0615] (v) amino acid 478 is threonine, arginine, or lysine;
[0616] (vi) amino acid 486 is phenylalanine, proline, or serine; and
[0617] (vii) amino acid 521 is proline or serine.
[0618] 148. An immunogenic composition comprising at least two CoV S glycoproteins.
[0619] 149. The immunogenic composition of enumerated embodiment 148, wherein one CoV S glycoprotein has an amino acid sequence with at least 90%, at least 91%, at least 92%, at least 93%, at least 94%, at least 95%, at least 96%, at least 97%, at least 98%, at least 99%, or 100% identity to SEQ ID NO: 87.
[0620] 150. The immunogenic composition of enumerated embodiment 148 or 149, wherein one CoV S glycoprotein has an amino acid sequence with at least 90%, at least 91%, at least 92%, at least 93%, at least 94%, at least 95%, at least 96%, at least 97%, at least 98%, at least 99%, or 100% identity to any one of SEQ ID NOS: 260, 274, and 284.
[0621] 151. The immunogenic composition of any one of enumerated embodiments 148-150, wherein one CoV S glycoprotein comprises an amino acid sequence with at least 90%, at least 91%, at least 92%, at least 93%, at least 94%, at least 95%, at least 96%, at least 97%, at least 98%, at least 99%, or 100% identity to any one of SEQ ID NOS: 245, 250, 255, 260, 265, 269, 273, 274, 277, and 284.
[0622] 152. The immunogenic composition of any one of enumerated embodiments 148-151, wherein the immunogenic composition comprises two CoV S glycoproteins.
[0623] 153. The immunogenic composition of any one of enumerated embodiments 148-151, wherein the immunogenic composition comprises three CoV S glycoproteins.
[0624] 154. The immunogenic composition of any one of enumerated embodiments 148-151, wherein the immunogenic composition comprises four CoV S glycoproteins.
[0625] 155. The immunogenic composition of any one of enumerated embodiments 148-151, wherein the immunogenic composition comprises five CoV S glycoproteins.
[0626] 156. The immunogenic composition of any one of enumerated embodiments 148-155, wherein the second CoV S glycoprotein comprises from 1 to 60 modifications compared to the first CoV S glycoprotein.
[0627] 157. The immunogenic composition of any one of enumerated embodiments 153-156, wherein the third CoV S glycoprotein comprises from 1 to 60 modifications compared to the first CoV S glycoprotein.
[0628] 158. The immunogenic composition of any one of enumerated embodiments 154-157, wherein the fourth CoV S glycoprotein comprises from 1 to 60 modifications compared to the first CoV S glycoprotein.
[0629] 159. The immunogenic composition of any one of enumerated embodiments 155-158, wherein the fifth CoV S glycoprotein comprises from 1 to 60 modifications compared to the first CoV S glycoprotein.
[0630] 160. The immunogenic composition of any one of enumerated embodiments 148-155, wherein the second CoV S glycoprotein comprises from 1 to 10 modifications compared to the first CoV S glycoprotein.
[0631] 161. The immunogenic composition of any one of enumerated embodiments 153-156, wherein the third CoV S glycoprotein comprises from 1 to 10 modifications compared to the first CoV S glycoprotein.
[0632] 162. The immunogenic composition of any one of enumerated embodiments 154-157, wherein the fourth CoV S glycoprotein comprises from 1 to 10 modifications compared to the first CoV S glycoprotein.
[0633] 163. The immunogenic composition of any one of enumerated embodiments 155-158, wherein the fifth CoV S glycoprotein comprises from 1 to 10 modifications compared to the first CoV S glycoprotein.
[0634] 164. The immunogenic composition of any one of enumerated embodiments 148-163, wherein at least one of the CoV S glycoproteins comprises an inactive furin cleavage site.
[0635] 165. The immunogenic composition of enumerated embodiment 164, wherein the inactive furin cleavage site comprises the amino acid sequence of QQAQ (SEQ ID NO: 7).
[0636] 166. The immunogenic composition of any one of enumerated embodiments 148-165, wherein at least one of the CoV S glycoproteins comprises mutation of amino acids 986 and 987 to proline, wherein the CoV S glycoprotein sequence is numbered according to SEQ ID NO: 1.
[0637] 167. The immunogenic composition of any one of enumerated embodiments 148-166, wherein all of the CoV S glycoproteins in the composition comprise an inactive furin cleavage site.
[0638] 168. The immunogenic composition of enumerated embodiment 167, wherein the inactive furin cleavage site comprises the amino acid sequence of QQAQ (SEQ ID NO: 7).
[0639] 169. The immunogenic composition of any one of enumerated embodiments 148-168, wherein all of the CoV S glycoproteins comprise mutation of amino acids 986 and 987 to proline, wherein the CoV S glycoprotein sequence is numbered according to SEQ ID NO: 1.
[0640] 170. The immunogenic composition of any one of enumerated embodiments 148-169 comprising from 0.1 μg to 25 μg, 0.1 μg to 10 μg, 0.001 μg to 10 μg, 0.001 μg to 25 μg, or from 0.1 μg to 5 μg of each CoV S polypeptide.
[0641] 171. The immunogenic composition of any one of enumerated embodiments 148-170, wherein a first CoV S glycoprotein is present in the composition in an amount from about 1 μg to about 10 μg, and the other CoV S glycoproteins are each present in an amount that is less than ½, less than ⅓, less than ¼, less than ⅕, less than ⅙, less than 1/7, less than ⅛, less than 1/9, less than 1/10, less than 1/25, less than 1/50, less than 1/75, or less than 1/100 of the first CoV S glycoprotein.
[0642] 172. The immunogenic composition of any one of enumerated embodiments 148-171, wherein the amount of the second CoV S glycoprotein in the composition is less than the amount of the first CoV S glycoprotein in the composition.
[0643] 173. The immunogenic composition of any one of enumerated embodiments 153-172, wherein the amount of the third CoV S glycoprotein in the composition is less than the amount of the first CoV S glycoprotein in the composition.
[0644] 174. The immunogenic composition of any one of enumerated embodiments 154-173, wherein the amount of the fourth CoV S glycoprotein in the composition is less than the amount of the first CoV S glycoprotein in the composition.
[0645] 175. The immunogenic composition of any one of enumerated embodiments 155-174, wherein the amount of the fifth CoV S glycoprotein in the composition is less than the amount of the first CoV S glycoprotein in the composition.
[0646] 176. The immunogenic composition of any one of enumerated embodiments 148-175, comprising an adjuvant.
[0647] 177. The immunogenic composition of enumerated embodiment 176, wherein the adjuvant is a saponin adjuvant.
[0648] 178. The immunogenic composition of enumerated embodiment 177, wherein the saponin adjuvant comprises at least two iscom particles, wherein:
   [0649] the first iscom particle comprises fraction A of Quillaja Saponaria Molina and not fraction C of Quillaja Saponaria Molina; and
   [0650] the second iscom particle comprises fraction C of Quillaja Saponaria Molina and not fraction A of Quillaja Saponaria Molina.
[0651] 179. The immunogenic composition of enumerated embodiment 178, wherein fraction A of Quillaja Saponaria Molina and fraction C of Quillaja Saponaria Molina account for about 85% by weight and about 15% by weight, respectively, of the sum of weights of fraction A of Quillaja Saponaria Molina and fraction C of Quillaja Saponaria Molina in the saponin adjuvant.
[0652] 180. The immunogenic composition of enumerated embodiment 178, wherein fraction A of Quillaja Saponaria Molina and fraction C of Quillaja Saponaria Molina account for about 92% by weight and about 8% by weight, respectively, of the sum of the weights of fraction A of Quillaja Saponaria Molina and fraction C of Quillaja Saponaria Molina in the saponin adjuvant.
[0653] 181. The immunogenic composition of enumerated embodiment 178, wherein fraction A of Quillaja Saponaria Molina accounts for at least about 85% by weight, and fraction C of Quillaja Saponaria Molina accounts for the remainder, respectively, of the sum of the weights of fraction A of Quillaja Saponaria Molina and fraction C of Quillaja Saponaria Molina in the saponin adjuvant.
[0654] 182. The immunogenic composition of enumerated embodiment 178, wherein fraction A of Quillaja Saponaria Molina accounts for 50-96% by weight and fraction C of Quillaja Saponaria Molina accounts for the remainder, respectively, of the sum of the weights of fraction A of Quillaja Saponaria Molina and fraction C of Quillaja Saponaria Molina in the saponin adjuvant.
[0655] 183. The immunogenic composition of any one of enumerated embodiments 148-182, comprising from about 25 μg to about 100 μg of adjuvant.
[0656] 184. The immunogenic composition of any one of enumerated embodiments 148-183, comprising about 50 μg or 75 μg of adjuvant.
[0657] 185. The immunogenic composition of any one of enumerated embodiments 148-184, wherein one or more of the second, third, fourth, or fifth CoV S glycoprotein comprises one or more modifications compared to the first CoV S glycoprotein at amino acid 180, 252, 253, 444, 478, 486, or 521, wherein the one or more modifications are numbered according to a CoV S glycoprotein of SEQ ID NO: 1.
[0658] 186. The immunogenic composition of enumerated embodiment 185, wherein:
   [0659] (i) amino acid 180 is glutamate or valine;
   [0660] (ii) amino acid 252 is glycine or valine;
   [0661] (iii) amino acid 253 is aspartate or glycine;
   [0662] (iv) amino acid 444 is lysine or threonine;
   [0663] (v) amino acid 478 is threonine, arginine, or lysine;
   [0664] (vi) amino acid 486 is phenylalanine, proline, or serine; and
   [0665] (vii) amino acid 521 is proline or serine.
[0666] 187. An immunogenic composition comprising:
   [0667] (i) one or more non-naturally occurring SARS-COV-2 S glycoproteins having at least 80%, at least 81%, at least 82%, at least 83%, at least 84%, at least 85%, at least 86%, at least 87%, at least 88%, at least 89%, at least 90%, at least 91%, at least 92%, at least 93%, at least 94%, at least 95%, at least 96%, at least 97%, at least 98%, at least 99%, or 100% identity to any one of SEQ ID NOS: 87, 260, 222, 227, 274, and 284; and
   [0668] (ii) a pharmaceutically acceptable buffer.
[0669] 188. The immunogenic composition of enumerated embodiment 187, comprising: a non-naturally occurring SARS-COV-2 S glycoprotein having at least 80%, at least 81%, at least 82%, at least 83%, at least 84%, at least 85%, at least 86%, at least 87%, at least 88%, at least 89%, at least 90%, at least 91%, at least 92%, at least 93%, at least 94%, at least 95%, at least 96%, at least 97%, at least 98%, at least 99%, or 100% identity to SEQ ID NO: 274.
[0670] 189. The immunogenic composition of any one of enumerated embodiments 187-188, comprising from about 1 μg to about 25 μg of SARS-COV-2 S glycoprotein.
[0671] 190. The immunogenic composition of any one of enumerated embodiments 187-189, comprising a saponin adjuvant.
[0672] 191. The immunogenic composition of any one of enumerated embodiments 187-190, comprising from about 25 to about 100 μg of saponin adjuvant.
[0673] 192. The immunogenic composition of any one of enumerated embodiments 187-190, comprising from about 25 to about 50 μg of saponin adjuvant.
[0674] 193. The immunogenic composition of any one of enumerated embodiments 187-192, comprising a nanoparticle comprising the one or more SARS-COV-2 S glycoproteins and a non-ionic detergent core.
[0675] 194. The immunogenic composition of enumerated embodiment 193, wherein the non-ionic detergent is selected from the group consisting of polysorbate-20 (PS20), polysorbate-40 (PS40), polysorbate-60 (PS60), polysorbate-65 (PS65), and polysorbate-80 (PS80).
[0676] 195. The immunogenic composition of any one of enumerated embodiments 187-194, wherein the saponin adjuvant comprises:
   [0677] (i) a first iscom particle comprising fraction A of Quillaja Saponaria Molina and not fraction C of Quillaja Saponaria Molina; and
   [0678] (ii) a second iscom particle comprising fraction C of Quillaja Saponaria Molina and not fraction A of Quillaja Saponaria Molina.
[0679] 196. The immunogenic composition of enumerated embodiment 195, wherein fraction A of Quillaja Saponaria Molina and fraction C of Quillaja Saponaria Molina account for about 85% by weight and about 15% by weight, respectively, of the sum of the weights of fraction A of Quillaja Saponaria Molina and fraction C of Quillaja Saponaria Molina in the saponin adjuvant.
[0680] 197. A method of stimulating an immune response against SARS-COV-2 or a heterogeneous SARS-COV-2 strain thereof in a human comprising administering an immunogenic composition of any one of enumerated embodiments 187-196.
[0681] 198. The immunogenic composition of enumerated embodiment 1, wherein the first CoV S glycoprotein comprises an inactive furin cleavage site.
[0682] 199. The immunogenic composition of enumerated embodiment 198, wherein the inactive furin cleavage site comprises the amino acid sequence of QQAQ (SEQ ID NO: 7).

### INCORPORATION BY REFERENCE

[0683] All references, articles, publications, patents, patent publications, and patent applications cited herein are incorporated by reference in their entireties for all purposes. However, mention of any reference, article, publication, patent, patent publication, and patent application cited herein is not, and should not be taken as, an acknowledgment or any form of suggestion that they constitute valid prior art or form part of the common general knowledge in any country in the world. The following patent documents are incorporated by reference herein in their entireties for all purposes: International Publication No. 2021/154812; International Publication No. 2022/203963; International Publication No. 2022/235663; International Publication No. 2004/004762; International Publication No. 2019/183063; International Publication No. 2017/041100; and PCT/US2022/080700.

The application's sequence listing, which the Patent Office published only in electronic form, follows.

SEQUENCE LISTING (334 sequences)

SEQ ID NO: 1 - protein, 1273 aa, Severe acute respiratory syndrome-related coronavirus
MFVFLVLLPLVSSQCVNLTTRTQLPPAYTNSFTRGVYYPDKVFRSSVLHSTQDLFLPFFSNVTWFHAIHVSGTNGTKRFDNPVLPFNDGVYFASTEKSNIIRGWIFGTTLDSKTQSLLIVNNATNVVIKVCEFQFCNDPFLGVYYHKNNKSWMESEFRVYSSANNCTFEYVSQPFLMDLEGKQGNFKNLREFVFKNIDGYFKIYSKHTPINLVRDLPQGFSALEPLVDLPIGINITRFQTLLALHRSYLTPGDSSSGWTAGAAAYYVGYLQPRTFLLKYNENGTITDAVDCALDPLSETKCTLKSFTVEKGIYQTSNFRVQPTESIVRFPNITNLCPFGEVFNATRFASVYAWNRKRISNCVADYSVLYNSASFSTFKCYGVSPTKLNDLCFTNVYADSFVIRGDEVRQIAPGQTGKIADYNYKLPDDFTGCVIAWNSNNLDSKVGGNYNYLYRLFRKSNLKPFERDISTEIYQAGSTPCNGVEGFNCYFPLQSYGFQPTNGVGYQPYRVVVLSFELLHAPATVCGPKKSTNLVKNKCVNFNFNGLTGTGVLTESNKKFLPFQQFGRDIADTTDAVRDPQTLEILDITPCSFGGVSVITPGTNTSNQVAVLYQDVNCTEVPVAIHADQLTPTWRVYSTGSNVFQTRAGCLIGAEHVNNSYECDIPIGAGICASYQTQTNSPRRARSVASQSIIAYTMSLGAENSVAYSNNSIAIPTNFTISVTTEILPVSMTKTSVDCTMYICGDSTECSNLLLQYGSFCTQLNRALTGIAVEQDKNTQEVFAQVKQIYKTPPIKDFGGFNFSQILPDPSKPSKRSFIEDLLFNKVTLADAGFIKQYGDCLGDIAARDLICAQKFNGLTVLPPLLTDEMIAQYTSALLAGTITSGWTFGAGAALQIPFAMQMAYRFNGIGVTQNVLYENQKLIANQFNSAIGKIQDSLSSTASALGKLQDVVNQNAQALNTLVKQLSSNFGAISSVLNDILSRLDKVEAEVQIDRLITGRLQSLQTYVTQQLIRAAEIRASANLAATKMSECVLGQSKRVDFCGKGYHLMSFPQSAPHGVVFLHVTYVPAQEKNFTTAPAICHDGKAHFPREGVFVSNGTHWFVTQRNFYEPQIITTDNTFVSGNCDVVIGIVNNTVYDPLQPELDSFKEELDKYFKNHTSPDVDLGDISGINASVVNIQKEIDRLNEVAKNLNESLIDLQELGKYEQYIKWPWYIWLGFIAGLIAIVMVTIMLCCMTSCCSCLKGCCSCGSCCKFDEDDSEPVLKGVKLHYT

SEQ ID NO: 2 - protein, 1260 aa, Severe acute respiratory syndrome-related coronavirus
QCVNLTTRTQLPPAYTNSFTRGVYYPDKVFRSSVLHSTQDLFLPFFSNVTWFHAIHVSGTNGTKRFDNPVLPFNDGVYFASTEKSNIIRGWIFGTTLDSKTQSLLIVNNATNVVIKVCEFQFCNDPFLGVYYHKNNKSWMESEFRVYSSANNCTFEYVSQPFLMDLEGKQGNFKNLREFVFKNIDGYFKIYSKHTPINLVRDLPQGFSALEPLVDLPIGINITRFQTLLALHRSYLTPGDSSSGWTAGAAAYYVGYLQPRTFLLKYNENGTITDAVDCALDPLSETKCTLKSFTVEKGIYQTSNFRVQPTESIVRFPNITNLCPFGEVFNATRFASVYAWNRKRISNCVADYSVLYNSASFSTFKCYGVSPTKLNDLCFTNVYADSFVIRGDEVRQIAPGQTGKIADYNYKLPDDFTGCVIAWNSNNLDSKVGGNYNYLYRLFRKSNLKPFERDISTEIYQAGSTPCNGVEGFNCYFPLQSYGFQPTNGVGYQPYRVVVLSFELLHAPATVCGPKKSTNLVKNKCVNFNFNGLTGTGVLTESNKKFLPFQQFGRDIADTTDAVRDPQTLEILDITPCSFGGVSVITPGTNTSNQVAVLYQDVNCTEVPVAIHADQLTPTWRVYSTGSNVFQTRAGCLIGAEHVNNSYECDIPIGAGICASYQTQTNSPRRARSVASQSIIAYTMSLGAENSVAYSNNSIAIPTNFTISVTTEILPVSMTKTSVDCTMYICGDSTECSNLLLQYGSFCTQLNRALTGIAVEQDKNTQEVFAQVKQIYKTPPIKDFGGFNFSQILPDPSKPSKRSFIEDLLFNKVTLADAGFIKQYGDCLGDIAARDLICAQKFNGLTVLPPLLTDEMIAQYTSALLAGTITSGWTFGAGAALQIPFAMQMAYRFNGIGVTQNVLYENQKLIANQFNSAIGKIQDSLSSTASALGKLQDVVNQNAQALNTLVKQLSSNFGAISSVLNDILSRLDKVEAEVQIDRLITGRLQSLQTYVTQQLIRAAEIRASANLAATKMSECVLGQSKRVDFCGKGYHLMSFPQSAPHGVVFLHVTYVPAQEKNFTTAPAICHDGKAHFPREGVFVSNGTHWFVTQRNFYEPQIITTDNTFVSGNCDVVIGIVNNTVYDPLQPELDSFKEELDKYFKNHTSPDVDLGDISGINASVVNIQKEIDRLNEVAKNLNESLIDLQELGKYEQYIKWPWYIWLGFIAGLIAIVMVTIMLCCMTSCCSCLKGCCSCGSCCKFDEDDSEPVLKGVKLHYT

SEQ ID NO: 3 - protein, 1273 aa, synthetic construct
  REGION 1..1273: note = RECOMBINANT S PROTEIN
MFVFLVLLPLVSSQCVNLTTRTQLPPAYTNSFTRGVYYPDKVFRSSVLHSTQDLFLPFFSNVTWFHAIHVSGTNGTKRFDNPVLPFNDGVYFASTEKSNIIRGWIFGTTLDSKTQSLLIVNNATNVVIKVCEFQFCNDPFLGVYYHKNNKSWMESEFRVYSSANNCTFEYVSQPFLMDLEGKQGNFKNLREFVFKNIDGYFKIYSKHTPINLVRDLPQGFSALEPLVDLPIGINITRFQTLLALHRSYLTPGDSSSGWTAGAAAYYVGYLQPRTFLLKYNENGTITDAVDCALDPLSETKCTLKSFTVEKGIYQTSNFRVQPTESIVRFPNITNLCPFGEVFNATRFASVYAWNRKRISNCVADYSVLYNSASFSTFKCYGVSPTKLNDLCFTNVYADSFVIRGDEVRQIAPGQTGKIADYNYKLPDDFTGCVIAWNSNNLDSKVGGNYNYLYRLFRKSNLKPFERDISTEIYQAGSTPCNGVEGFNCYFPLQSYGFQPTNGVGYQPYRVVVLSFELLHAPATVCGPKKSTNLVKNKCVNFNFNGLTGTGVLTESNKKFLPFQQFGRDIADTTDAVRDPQTLEILDITPCSFGGVSVITPGTNTSNQVAVLYQDVNCTEVPVAIHADQLTPTWRVYSTGSNVFQTRAGCLIGAEHVNNSYECDIPIGAGICASYQTQTNSPQQAQSVASQSIIAYTMSLGAENSVAYSNNSIAIPTNFTISVTTEILPVSMTKTSVDCTMYICGDSTECSNLLLQYGSFCTQLNRALTGIAVEQDKNTQEVFAQVKQIYKTPPIKDFGGFNFSQILPDPSKPSKRSFIEDLLFNKVTLADAGFIKQYGDCLGDIAARDLICAQKFNGLTVLPPLLTDEMIAQYTSALLAGTITSGWTFGAGAALQIPFAMQMAYRFNGIGVTQNVLYENQKLIANQFNSAIGKIQDSLSSTASALGKLQDVVNQNAQALNTLVKQLSSNFGAISSVLNDILSRLDKVEAEVQIDRLITGRLQSLQTYVTQQLIRAAEIRASANLAATKMSECVLGQSKRVDFCGKGYHLMSFPQSAPHGVVFLHVTYVPAQEKNFTTAPAICHDGKAHFPREGVFVSNGTHWFVTQRNFYEPQIITTDNTFVSGNCDVVIGIVNNTVYDPLQPELDSFKEELDKYFKNHTSPDVDLGDISGINASVVNIQKEIDRLNEVAKNLNESLIDLQELGKYEQYIKWPWYIWLGFIAGLIAIVMVTIMLCCMTSCCSCLKGCCSCGSCCKFDEDDSEPVLKGVKLHYT

SEQ ID NO: 4 - protein, 1260 aa, synthetic construct
  REGION 1..1260: note = RECOMBINANT S PROTEIN
QCVNLTTRTQLPPAYTNSFTRGVYYPDKVFRSSVLHSTQDLFLPFFSNVTWFHAIHVSGTNGTKRFDNPVLPFNDGVYFASTEKSNIIRGWIFGTTLDSKTQSLLIVNNATNVVIKVCEFQFCNDPFLGVYYHKNNKSWMESEFRVYSSANNCTFEYVSQPFLMDLEGKQGNFKNLREFVFKNIDGYFKIYSKHTPINLVRDLPQGFSALEPLVDLPIGINITRFQTLLALHRSYLTPGDSSSGWTAGAAAYYVGYLQPRTFLLKYNENGTITDAVDCALDPLSETKCTLKSFTVEKGIYQTSNFRVQPTESIVRFPNITNLCPFGEVFNATRFASVYAWNRKRISNCVADYSVLYNSASFSTFKCYGVSPTKLNDLCFTNVYADSFVIRGDEVRQIAPGQTGKIADYNYKLPDDFTGCVIAWNSNNLDSKVGGNYNYLYRLFRKSNLKPFERDISTEIYQAGSTPCNGVEGFNCYFPLQSYGFQPTNGVGYQPYRVVVLSFELLHAPATVCGPKKSTNLVKNKCVNFNFNGLTGTGVLTESNKKFLPFQQFGRDIADTTDAVRDPQTLEILDITPCSFGGVSVITPGTNTSNQVAVLYQDVNCTEVPVAIHADQLTPTWRVYSTGSNVFQTRAGCLIGAEHVNNSYECDIPIGAGICASYQTQTNSPQQAQSVASQSIIAYTMSLGAENSVAYSNNSIAIPTNFTISVTTEILPVSMTKTSVDCTMYICGDSTECSNLLLQYGSFCTQLNRALTGIAVEQDKNTQEVFAQVKQIYKTPPIKDFGGFNFSQILPDPSKPSKRSFIEDLLFNKVTLADAGFIKQYGDCLGDIAARDLICAQKFNGLTVLPPLLTDEMIAQYTSALLAGTITSGWTFGAGAALQIPFAMQMAYRFNGIGVTQNVLYENQKLIANQFNSAIGKIQDSLSSTASALGKLQDVVNQNAQALNTLVKQLSSNFGAISSVLNDILSRLDKVEAEVQIDRLITGRLQSLQTYVTQQLIRAAEIRASANLAATKMSECVLGQSKRVDFCGKGYHLMSFPQSAPHGVVFLHVTYVPAQEKNFTTAPAICHDGKAHFPREGVFVSNGTHWFVTQRNFYEPQIITTDNTFVSGNCDVVIGIVNNTVYDPLQPELDSFKEELDKYFKNHTSPDVDLGDISGINASVVNIQKEIDRLNEVAKNLNESLIDLQELGKYEQYIKWPWYIWLGFIAGLIAIVMVTIMLCCMTSCCSCLKGCCSCGSCCKFDEDDSEPVLKGVKLHYT

SEQ ID NO: 5 - protein, 13 aa, synthetic construct
  REGION 1..13: note = SIGNAL PEPTIDE
MFVFLVLLPLVSS

SEQ ID NO: 6 - protein, 4 aa, synthetic construct
  REGION 1..4: note = RECOMBINANT FURIN CLEAVAGE SITE
RRAR

SEQ ID NO: 7 - protein, 4 aa, synthetic construct
  REGION 1..4: note = RECOMBINANT FURIN CLEAVAGE SITE
QQAQ

SEQ ID NO: 8 - protein, 4 aa, synthetic construct
  REGION 1..4: note = RECOMBINANT FURIN CLEAVAGE SITE
QRAR

SEQ ID NO: 9 - protein, 4 aa, synthetic construct
  REGION 1..4: note = RECOMBINANT FURIN CLEAVAGE SITE
RQAR

SEQ ID NO: 10 - protein, 4 aa, synthetic construct
  REGION 1..4: note = RECOMBINANT FURIN CLEAVAGE SITE
RRAQ

SEQ ID NO: 11 - protein, 4 aa, synthetic construct
  REGION 1..4: note = RECOMBINANT FURIN CLEAVAGE SITE
QQAR

SEQ ID NO: 12 - protein, 4 aa, synthetic construct
  REGION 1..4: note = RECOMBINANT FURIN CLEAVAGE SITE
RQAQ

SEQ ID NO: 13 - protein, 4 aa, synthetic construct
  REGION 1..4: note = RECOMBINANT FURIN CLEAVAGE SITE
QRAQ

SEQ ID NO: 14 - protein, 4 aa, synthetic construct
  REGION 1..4: note = RECOMBINANT FURIN CLEAVAGE SITE
NNAN

SEQ ID NO: 15 - protein, 4 aa, synthetic construct
  REGION 1..4: note = RECOMBINANT FURIN CLEAVAGE SITE
NRAR

SEQ ID NO: 16 - protein, 4 aa, synthetic construct
  REGION 1..4: note = RECOMBINANT FURIN CLEAVAGE SITE
RNAR

SEQ ID NO: 17 - protein, 4 aa, synthetic construct
  REGION 1..4: note = RECOMBINANT FURIN CLEAVAGE SITE
RRAN

SEQ ID NO: 18 - protein, 4 aa, synthetic construct
  REGION 1..4: note = RECOMBINANT FURIN CLEAVAGE SITE
NNAR

SEQ ID NO: 19 - protein, 4 aa, synthetic construct
  REGION 1..4: note = RECOMBINANT FURIN CLEAVAGE SITE
RNAN

SEQ ID NO: 20 - protein, 4 aa, synthetic construct
  REGION 1..4: note = RECOMBINANT FURIN CLEAVAGE SITE
NRAN

SEQ ID NO: 21 - protein, 4 aa, synthetic construct
  REGION 1..4: note = RECOMBINANT FURIN CLEAVAGE SITE
AAAA

SEQ ID NO: 22 - protein, 4 aa, synthetic construct
  REGION 1..4: note = RECOMBINANT FURIN CLEAVAGE SITE
ARAR

SEQ ID NO: 23 - protein, 4 aa, synthetic construct
  REGION 1..4: note = RECOMBINANT FURIN CLEAVAGE SITE
RAAR

SEQ ID NO: 24 - protein, 4 aa, synthetic construct
  REGION 1..4: note = RECOMBINANT FURIN CLEAVAGE SITE
RRAA

SEQ ID NO: 25 - protein, 4 aa, synthetic construct
  REGION 1..4: note = RECOMBINANT FURIN CLEAVAGE SITE
AAAR

SEQ ID NO: 26 - protein, 4 aa, synthetic construct
  REGION 1..4: note = RECOMBINANT FURIN CLEAVAGE SITE
RAAA

SEQ ID NO: 27 - protein, 4 aa, synthetic construct
  REGION 1..4: note = RECOMBINANT FURIN CLEAVAGE SITE
ARAA

SEQ ID NO: 28 - protein, 4 aa, synthetic construct
  REGION 1..4: note = RECOMBINANT FURIN CLEAVAGE SITE
GGAG

SEQ ID NO: 29 - protein, 4 aa, synthetic construct
  REGION 1..4: note = RECOMBINANT FURIN CLEAVAGE SITE
GRAR

SEQ ID NO: 30 - protein, 4 aa, synthetic construct
  REGION 1..4: note = RECOMBINANT FURIN CLEAVAGE SITE
RGAR

SEQ ID NO: 31 - protein, 4 aa, synthetic construct
  REGION 1..4: note = RECOMBINANT FURIN CLEAVAGE SITE
RRAG

SEQ ID NO: 32 - protein, 4 aa, synthetic construct
  REGION 1..4: note = RECOMBINANT FURIN CLEAVAGE SITE
GGAR

SEQ ID NO: 33 - protein, 4 aa, synthetic construct
  REGION 1..4: note = RECOMBINANT FURIN CLEAVAGE SITE
RGAG

SEQ ID NO: 34 - protein, 4 aa, synthetic construct
  REGION 1..4: note = RECOMBINANT FURIN CLEAVAGE SITE
GRAG

SEQ ID NO: 35 - DNA, 3819 bp, synthetic construct
  misc_feature 1..3819: note = RECOMBINANT SPIKE PROTEIN
  source 1..3819: mol_type = other DNA
atgttcgtcttcctggtgctgctgcccctggtgtccagccagtgcgtgaacctgaccactaggactcagctgcctcccgcttacaccaactcattcactcgcggtgtgtactaccctgacaaggtcttccgttcttcagtgctgcactcaactcaggacctgttcctgcccttcttctccaacgtcacctggttccacgccatccacgtgtccggcaccaacggcactaagcgcttcgacaacccagtgctgcctttcaacgacggtgtctacttcgcttcaaccgagaagtccaacatcatccgtggatggatcttcggcaccactctggacagcaagactcagtctctgctgatcgtcaacaacgccaccaacgtggtcatcaaggtctgcgaattccagttctgcaacgacccattcctgggcgtctactaccacaagaacaacaagtcatggatggagtccgaattccgcgtctactccagcgctaacaactgcactttcgagtacgtgtcccagcctttcctgatggacctggaaggaaagcagggtaacttcaagaacctgagggagttcgtgttcaagaacatcgacggatacttcaagatttacagcaagcacaccccaatcaacctggtgcgcgacctgcctcagggtttctctgctctggagccactggtggacctgcctatcggcatcaacatcacccgcttccagactctgctggctctgcaccgttcctacctgactccaggcgactcatcttctggatggactgctggagctgctgcttactacgtgggctacctgcagcctcgcaccttcctgctgaagtacaacgaaaacggaaccatcactgacgccgtcgactgcgctctggaccctctgtcagaaaccaagtgcactctgaagtccttcaccgtggagaagggcatctaccagacttcaaacttcagggtgcagcccaccgaatccatcgtcagattccctaacatcactaacctgtgccccttcggagaggtcttcaacgccacccgcttcgcttccgtgtacgcctggaacaggaagagaatctcaaactgcgtcgctgactactccgtgctgtacaactcagcctccttcagcaccttcaagtgctacggcgtgtcaccaactaagctgaacgacctgtgcttcaccaacgtctacgccgactccttcgtgatcaggggagacgaggtcagacagatcgctcctggccagactggaaagatcgccgactacaactacaagctgcccgacgacttcaccggttgcgtcatcgcttggaacagcaacaacctggactctaaagtgggtggcaactacaactacctgtaccgcctgttccgtaagtcaaacctgaagccattcgagagggacatcagcactgaaatctaccaggccggatctaccccttgcaacggtgtcgagggcttcaactgctacttccccctgcagtcctacggtttccagccaactaacggtgtgggctaccagccttacagagtggtcgtgctgagcttcgaactgctccacgctcctgctactgtgtgcggtccaaagaagtctaccaacctggtcaagaacaagtgcgtgaacttcaacttcaacggcctgaccggaactggtgtcctgaccgagagcaacaagaagttcctgcccttccagcagttcggaagggacatcgctgacaccactgacgctgtgcgcgaccctcagaccctggaaatcctggacatcactccatgctcattcggaggtgtctccgtgatcacccctggcaccaacacttctaaccaggtcgctgtgctgtaccaggacgtcaactgcaccgaggtccctgtggccatccacgctgaccagctgacccccacttggcgcgtgtactccaccggcagcaacgtgttccagactcgtgctggttgcctgatcggcgccgagcacgtgaacaacagctacgaatgcgacatccccatcggcgctggaatctgcgcctcttaccagacccagactaacagcccacgcagggctcgctctgtggcctctcagtcaatcatcgcttacaccatgtcactgggcgctgaaaactccgtggcctactctaacaactcaatcgccatccccaccaacttcactatcagcgtgaccactgagatcctgccagtcagcatgaccaagacttctgtggactgcactatgtacatctgcggagacagcaccgaatgctctaacctgctgctgcagtacggctctttctgcacccagctgaaccgtgctctgactggaatcgccgtggagcaggacaagaacactcaggaagtcttcgctcaggtgaagcaaatctacaagaccccacctatcaaggacttcggcggattcaacttctcccagatcctgcctgacccctccaagccaagcaagcgctctttcatcgaggacctgctgttcaacaaggtcactctggccgacgctggattcatcaagcagtacggagactgcctgggtgacatcgccgctcgtgacctgatctgcgctcagaagttcaacggtctgaccgtgctgcccccactgctgactgacgaaatgatcgcccagtacactagcgccctgctggctggaaccatcacttctggttggaccttcggtgctggcgccgctctgcagatccctttcgctatgcagatggcctaccgtttcaacggaatcggtgtcacccagaacgtgctgtacgagaaccagaagctgatcgctaaccagttcaactcagccatcggaaagatccaggacagcctgagctctactgcctctgctctgggcaagctgcaggacgtcgtgaaccagaacgcccaggctctgaacaccctggtcaagcagctgtcatccaacttcggtgctatcagctctgtgctgaacgacatcctgtcccgcctggacaaggtcgaggccgaagtgcagatcgaccgcctgatcactggccgtctgcagtcactgcagacctacgtgactcagcagctgatcagggccgctgaaatcagagcctccgctaacctggccgctaccaagatgagcgagtgcgtcctgggtcaatctaagcgtgtggacttctgcggcaagggataccacctgatgtcattccctcagtctgctccccacggtgtggtgttcctgcacgtcacctacgtgccagcccaggagaagaacttcaccactgcccctgctatctgccacgacggcaaggctcacttccccagggaaggtgtcttcgtgagcaacggcacccactggttcgtcactcagagaaacttctacgagccacagatcatcaccactgacaacactttcgtgtctggaaactgcgacgtggtcatcggtatcgtcaacaacaccgtgtacgaccccctgcagccagagctggactcattcaaggaggaactggacaagtacttcaagaaccacacctcccctgacgtcgacctgggcgacatctcaggaatcaacgcttccgtcgtgaacatccagaaggagatcgaccgcctgaacgaagtggccaagaacctgaacgaaagcctgatcgacctgcaggagctgggcaagtacgaacagtacatcaagtggccttggtacatctggctgggtttcatcgctggcctcatcgctatcgtgatggtgaccatcatgctgtgctgcatgacttcatgctgctcctgcctgaagggctgctgcagctgcggatcttgctgcaagttcgacgaggacgactctgaacccgtcctgaagggcgtgaagctgcactacacc

SEQ ID NO: 36 - protein, 1279 aa, synthetic construct
  REGION 1..1279: note = RECOMBINANT SPIKE PROTEIN
MFVFLVLLPLVSSQCVNLTTRTQLPPAYTNSFTRGVYYPDKVFRSSVLHSTQDLFLPFFSNVTWFHAIHVSGTNGTKRFDNPVLPFNDGVYFASTEKSNIIRGWIFGTTLDSKTQSLLIVNNATNVVIKVCEFQFCNDPFLGVYYHKNNKSWMESEFRVYSSANNCTFEYVSQPFLMDLEGKQGNFKNLREFVFKNIDGYFKIYSKHTPINLVRDLPQGFSALEPLVDLPIGINITRFQTLLALHRSYLTPGDSSSGWTAGAAAYYVGYLQPRTFLLKYNENGTITDAVDCALDPLSETKCTLKSFTVEKGIYQTSNFRVQPTESIVRFPNITNLCPFGEVFNATRFASVYAWNRKRISNCVADYSVLYNSASFSTFKCYGVSPTKLNDLCFTNVYADSFVIRGDEVRQIAPGQTGKIADYNYKLPDDFTGCVIAWNSNNLDSKVGGNYNYLYRLFRKSNLKPFERDISTEIYQAGSTPCNGVEGFNCYFPLQSYGFQPTNGVGYQPYRVVVLSFELLHAPATVCGPKKSTNLVKNKCVNFNFNGLTGTGVLTESNKKFLPFQQFGRDIADTTDAVRDPQTLEILDITPCSFGGVSVITPGTNTSNQVAVLYQDVNCTEVPVAIHADQLTPTWRVYSTGSNVFQTRAGCLIGAEHVNNSYECDIPIGAGICASYQTQTNSPRRARSVASQSIIAYTMSLGAENSVAYSNNSIAIPTNFTISVTTEILPVSMTKTSVDCTMYICGDSTECSNLLLQYGSFCTQLNRALTGIAVEQDKNTQEVFAQVKQIYKTPPIKDFGGFNFSQILPDPSKPSKRSFIEDLLFNKVTLADAGFIKQYGDCLGDIAARDLICAQKFNGLTVLPPLLTDEMIAQYTSALLAGTITSGWTFGAGAALQIPFAMQMAYRFNGIGVTQNVLYENQKLIANQFNSAIGKIQDSLSSTASALGKLQDVVNQNAQALNTLVKQLSSNFGAISSVLNDILSRLDKVEAEVQIDRLITGRLQSLQTYVTQQLIRAAEIRASANLAATKMSECVLGQSKRVDFCGKGYHLMSFPQSAPHGVVFLHVTYVPAQEKNFTTAPAICHDGKAHFPREGVFVSNGTHWFVTQRNFYEPQIITTDNTFVSGNCDVVIGIVNNTVYDPLQPELDSFKEELDKYFKNHTSPDVDLGDISGINASVVNIQKEIDRLNEVAKNLNESLIDLQELGKYEQYIKWPWYIWLGFIAGLIAIVMVTIMLCCMTSCCSCLKGCCSCGSCCKFDEDDSEPVLKGVKLHYTHHHHHH

SEQ ID NO: 37 - DNA, 3837 bp, synthetic construct
  misc_feature 1..3837: note = RECOMBINANT SPIKE PROTEIN
  source 1..3837: mol_type = other DNA
atgttcgtcttcctggtgctgctgcccctggtgtccagccagtgcgtgaacctgaccactaggactcagctgcctcccgcttacaccaactcattcactcgcggtgtgtactaccctgacaaggtcttccgttcttcagtgctgcactcaactcaggacctgttcctgcccttcttctccaacgtcacctggttccacgccatccacgtgtccggcaccaacggcactaagcgcttcgacaacccagtgctgcctttcaacgacggtgtctacttcgcttcaaccgagaagtccaacatcatccgtggatggatcttcggcaccactctggacagcaagactcagtctctgctgatcgtcaacaacgccaccaacgtggtcatcaaggtctgcgaattccagttctgcaacgacccattcctgggcgtctactaccacaagaacaacaagtcatggatggagtccgaattccgcgtctactccagcgctaacaactgcactttcgagtacgtgtcccagcctttcctgatggacctggaaggaaagcagggtaacttcaagaacctgagggagttcgtgttcaagaacatcgacggatacttcaagatttacagcaagcacaccccaatcaacctggtgcgcgacctgcctcagggtttctctgctctggagccactggtggacctgcctatcggcatcaacatcacccgcttccagactctgctggctctgcaccgttcctacctgactccaggcgactcatcttctggatggactgctggagctgctgcttactacgtgggctacctgcagcctcgcaccttcctgctgaagtacaacgaaaacggaaccatcactgacgccgtcgactgcgctctggaccctctgtcagaaaccaagtgcactctgaagtccttcaccgtggagaagggcatctaccagacttcaaacttcagggtgcagcccaccgaatccatcgtcagattccctaacatcactaacctgtgccccttcggagaggtcttcaacgccacccgcttcgcttccgtgtacgcctggaacaggaagagaatctcaaactgcgtcgctgactactccgtgctgtacaactcagcctccttcagcaccttcaagtgctacggcgtgtcaccaactaagctgaacgacctgtgcttcaccaacgtctacgccgactccttcgtgatcaggggagacgaggtcagacagatcgctcctggccagactggaaagatcgccgactacaactacaagctgcccgacgacttcaccggttgcgtcatcgcttggaacagcaacaacctggactctaaagtgggtggcaactacaactacctgtaccgcctgttccgtaagtcaaacctgaagccattcgagagggacatcagcactgaaatctaccaggccggatctaccccttgcaacggtgtcgagggcttcaactgctacttccccctgcagtcctacggtttccagccaactaacggtgtgggctaccagccttacagagtggtcgtgctgagcttcgaactgctccacgctcctgctactgtgtgcggtccaaagaagtctaccaacctggtcaagaacaagtgcgtgaacttcaacttcaacggcctgaccggaactggtgtcctgaccgagagcaacaagaagttcctgcccttccagcagttcggaagggacatcgctgacaccactgacgctgtgcgcgaccctcagaccctggaaatcctggacatcactccatgctcattcggaggtgtctccgtgatcacccctggcaccaacacttctaaccaggtcgctgtgctgtaccaggacgtcaactgcaccgaggtccctgtggccatccacgctgaccagctgacccccacttggcgcgtgtactccaccggcagcaacgtgttccagactcgtgctggttgcctgatcggcgccgagcacgtgaacaacagctacgaatgcgacatccccatcggcgctggaatctgcgcctcttaccagacccagactaacagcccacgcagggctcgctctgtggcctctcagtcaatcatcgcttacaccatgtcactgggcgctgaaaactccgtggcctactctaacaactcaatcgccatccccaccaacttcactatcagcgtgaccactgagatcctgccagtcagcatgaccaagacttctgtggactgcactatgtacatctgcggagacagcaccgaatgctctaacctgctgctgcagtacggctctttctgcacccagctgaaccgtgctctgactggaatcgccgtggagcaggacaagaacactcaggaagtcttcgctcaggtgaagcaaatctacaagaccccacctatcaaggacttcggcggattcaacttctcccagatcctgcctgacccctccaagccaagcaagcgctctttcatcgaggacctgctgttcaacaaggtcactctggccgacgctggattcatcaagcagtacggagactgcctgggtgacatcgccgctcgtgacctgatctgcgctcagaagttcaacggtctgaccgtgctgcccccactgctgactgacgaaatgatcgcccagtacactagcgccctgctggctggaaccatcacttctggttggaccttcggtgctggcgccgctctgcagatccctttcgctatgcagatggcctaccgtttcaacggaatcggtgtcacccagaacgtgctgtacgagaaccagaagctgatcgctaaccagttcaactcagccatcggaaagatccaggacagcctgagctctactgcctctgctctgggcaagctgcaggacgtcgtgaaccagaacgcccaggctctgaacaccctggtcaagcagctgtcatccaacttcggtgctatcagctctgtgctgaacgacatcctgtcccgcctggacaaggtcgaggccgaagtgcagatcgaccgcctgatcactggccgtctgcagtcactgcagacctacgtgactcagcagctgatcagggccgctgaaatcagagcctccgctaacctggccgctaccaagatgagcgagtgcgtcctgggtcaatctaagcgtgtggacttctgcggcaagggataccacctgatgtcattccctcagtctgctccccacggtgtggtgttcctgcacgtcacctacgtgccagcccaggagaagaacttcaccactgcccctgctatctgccacgacggcaaggctcacttccccagggaaggtgtcttcgtgagcaacggcacccactggttcgtcactcagagaaacttctacgagccacagatcatcaccactgacaacactttcgtgtctggaaactgcgacgtggtcatcggtatcgtcaacaacaccgtgtacgaccccctgcagccagagctggactcattcaaggaggaactggacaagtacttcaagaaccacacctcccctgacgtcgacctgggcgacatctcaggaatcaacgcttccgtcgtgaacatccagaaggagatcgaccgcctgaacgaagtggccaagaacctgaacgaaagcctgatcgacctgcaggagctgggcaagtacgaacagtacatcaagtggccttggtacatctggctgggtttcatcgctggcctcatcgctatcgtgatggtgaccatcatgctgtgctgcatgacttcatgctgctcctgcctgaagggctgctgcagctgcggatcttgctgcaagttcgacgaggacgactctgaacccgtcctgaagggcgtgaagctgcactacacccaccaccaccaccaccac

SEQ ID NO: 38 - protein, 1266 aa, synthetic construct
  REGION 1..1266: note = RECOMBINANT SPIKE PROTEIN
QCVNLTTRTQLPPAYTNSFTRGVYYPDKVFRSSVLHSTQDLFLPFFSNVTWFHAIHVSGTNGTKRFDNPVLPFNDGVYFASTEKSNIIRGWIFGTTLDSKTQSLLIVNNATNVVIKVCEFQFCNDPFLGVYYHKNNKSWMESEFRVYSSANNCTFEYVSQPFLMDLEGKQGNFKNLREFVFKNIDGYFKIYSKHTPINLVRDLPQGFSALEPLVDLPIGINITRFQTLLALHRSYLTPGDSSSGWTAGAAAYYVGYLQPRTFLLKYNENGTITDAVDCALDPLSETKCTLKSFTVEKGIYQTSNFRVQPTESIVRFPNITNLCPFGEVFNATRFASVYAWNRKRISNCVADYSVLYNSASFSTFKCYGVSPTKLNDLCFTNVYADSFVIRGDEVRQIAPGQTGKIADYNYKLPDDFTGCVIAWNSNNLDSKVGGNYNYLYRLFRKSNLKPFERDISTEIYQAGSTPCNGVEGFNCYFPLQSYGFQPTNGVGYQPYRVVVLSFELLHAPATVCGPKKSTNLVKNKCVNFNFNGLTGTGVLTESNKKFLPFQQFGRDIADTTDAVRDPQTLEILDITPCSFGGVSVITPGTNTSNQVAVLYQDVNCTEVPVAIHADQLTPTWRVYSTGSNVFQTRAGCLIGAEHVNNSYECDIPIGAGICASYQTQTNSPRRARSVASQSIIAYTMSLGAENSVAYSNNSIAIPTNFTISVTTEILPVSMTKTSVDCTMYICGDSTECSNLLLQYGSFCTQLNRALTGIAVEQDKNTQEVFAQVKQIYKTPPIKDFGGFNFSQILPDPSKPSKRSFIEDLLFNKVTLADAGFIKQYGDCLGDIAARDLICAQKFNGLTVLPPLLTDEMIAQYTSALLAGTITSGWTFGAGAALQIPFAMQMAYRFNGIGVTQNVLYENQKLIANQFNSAIGKIQDSLSSTASALGKLQDVVNQNAQALNTLVKQLSSNFGAISSVLNDILSRLDKVEAEVQIDRLITGRLQSLQTYVTQQLIRAAEIRASANLAATKMSECVLGQSKRVDFCGKGYHLMSFPQSAPHGVVFLHVTYVPAQEKNFTTAPAICHDGKAHFPREGVFVSNGTHWFVTQRNFYEPQIITTDNTFVSGNCDVVIGIVNNTVYDPLQPELDSFKEELDKYFKNHTSPDVDLGDISGINASVVNIQKEIDRLNEVAKNLNESLIDLQELGKYEQYIKWPWYIWLGFIAGLIAIVMVTIMLCCMTSCCSCLKGCCSCGSCCKFDEDDSEPVLKGVKLHYTHHHHHH

SEQ ID NO: 39 - protein, 60 aa, synthetic construct
  REGION 1..60: note = RECOMBINANT SPIKE PROTEIN
WYIWLGFIAGLIAIVMVTIMLCCMTSCCSCLKGCCSCGSCCKFDEDDSEPVLKGVKLHYT

SEQ ID NO: 40 - protein, 1213 aa, synthetic construct
  REGION 1..1213: note = RECOMBINANT SPIKE PROTEIN
MFVFLVLLPLVSSQCVNLTTRTQLPPAYTNSFTRGVYYPDKVFRSSVLHSTQDLFLPFFSNVTWFHAIHVSGTNGTKRFDNPVLPFNDGVYFASTEKSNIIRGWIFGTTLDSKTQSLLIVNNATNVVIKVCEFQFCNDPFLGVYYHKNNKSWMESEFRVYSSANNCTFEYVSQPFLMDLEGKQGNFKNLREFVFKNIDGYFKIYSKHTPINLVRDLPQGFSALEPLVDLPIGINITRFQTLLALHRSYLTPGDSSSGWTAGAAAYYVGYLQPRTFLLKYNENGTITDAVDCALDPLSETKCTLKSFTVEKGIYQTSNFRVQPTESIVRFPNITNLCPFGEVFNATRFASVYAWNRKRISNCVADYSVLYNSASFSTFKCYGVSPTKLNDLCFTNVYADSFVIRGDEVRQIAPGQTGKIADYNYKLPDDFTGCVIAWNSNNLDSKVGGNYNYLYRLFRKSNLKPFERDISTEIYQAGSTPCNGVEGFNCYFPLQSYGFQPTNGVGYQPYRVVVLSFELLHAPATVCGPKKSTNLVKNKCVNFNFNGLTGTGVLTESNKKFLPFQQFGRDIADTTDAVRDPQTLEILDITPCSFGGVSVITPGTNTSNQVAVLYQDVNCTEVPVAIHADQLTPTWRVYSTGSNVFQTRAGCLIGAEHVNNSYECDIPIGAGICASYQTQTNSPRRARSVASQSIIAYTMSLGAENSVAYSNNSIAIPTNFTISVTTEILPVSMTKTSVDCTMYICGDSTECSNLLLQYGSFCTQLNRALTGIAVEQDKNTQEVFAQVKQIYKTPPIKDFGGFNFSQILPDPSKPSKRSFIEDLLFNKVTLADAGFIKQYGDCLGDIAARDLICAQKFNGLTVLPPLLTDEMIAQYTSALLAGTITSGWTFGAGAALQIPFAMQMAYRFNGIGVTQNVLYENQKLIANQFNSAIGKIQDSLSSTASALGKLQDVVNQNAQALNTLVKQLSSNFGAISSVLNDILSRLDKVEAEVQIDRLITGRLQSLQTYVTQQLIRAAEIRASANLAATKMSECVLGQSKRVDFCGKGYHLMSFPQSAPHGVVFLHVTYVPAQEKNFTTAPAICHDGKAHFPREGVFVSNGTHWFVTQRNFYEPQIITTDNTFVSGNCDVVIGIVNNTVYDPLQPELDSFKEELDKYFKNHTSPDVDLGDISGINASVVNIQKEIDRLNEVAKNLNESLIDLQELGKYEQYIKWP

SEQ ID NO: 41 - protein, 1200 aa, synthetic construct
  REGION 1..1200: note = RECOMBINANT SPIKE PROTEIN
QCVNLTTRTQLPPAYTNSFTRGVYYPDKVFRSSVLHSTQDLFLPFFSNVTWFHAIHVSGTNGTKRFDNPVLPFNDGVYFASTEKSNIIRGWIFGTTLDSKTQSLLIVNNATNVVIKVCEFQFCNDPFLGVYYHKNNKSWMESEFRVYSSANNCTFEYVSQPFLMDLEGKQGNFKNLREFVFKNIDGYFKIYSKHTPINLVRDLPQGFSALEPLVDLPIGINITRFQTLLALHRSYLTPGDSSSGWTAGAAAYYVGYLQPRTFLLKYNENGTITDAVDCALDPLSETKCTLKSFTVEKGIYQTSNFRVQPTESIVRFPNITNLCPFGEVFNATRFASVYAWNRKRISNCVADYSVLYNSASFSTFKCYGVSPTKLNDLCFTNVYADSFVIRGDEVRQIAPGQTGKIADYNYKLPDDFTGCVIAWNSNNLDSKVGGNYNYLYRLFRKSNLKPFERDISTEIYQAGSTPCNGVEGFNCYFPLQSYGFQPTNGVGYQPYRVVVLSFELLHAPATVCGPKKSTNLVKNKCVNFNFNGLTGTGVLTESNKKFLPFQQFGRDIADTTDAVRDPQTLEILDITPCSFGGVSVITPGTNTSNQVAVLYQDVNCTEVPVAIHADQLTPTWRVYSTGSNVFQTRAGCLIGAEHVNNSYECDIPIGAGICASYQTQTNSPRRARSVASQSIIAYTMSLGAENSVAYSNNSIAIPTNFTISVTTEILPVSMTKTSVDCTMYICGDSTECSNLLLQYGSFCTQLNRALTGIAVEQDKNTQEVFAQVKQIYKTPPIKDFGGFNFSQILPDPSKPSKRSFIEDLLFNKVTLADAGFIKQYGDCLGDIAARDLICAQKFNGLTVLPPLLTDEMIAQYTSALLAGTITSGWTFGAGAALQIPFAMQMAYRFNGIGVTQNVLYENQKLIANQFNSAIGKIQDSLSSTASALGKLQDVVNQNAQALNTLVKQLSSNFGAISSVLNDILSRLDKVEAEVQIDRLITGRLQSLQTYVTQQLIRAAEIRASANLAATKMSECVLGQSKRVDFCGKGYHLMSFPQSAPHGVVFLHVTYVPAQEKNFTTAPAICHDGKAHFPREGVFVSNGTHWFVTQRNFYEPQIITTDNTFVSGNCDVVIGIVNNTVYDPLQPELDSFKEELDKYFKNHTSPDVDLGDISGINASVVNIQKEIDRLNEVAKNLNESLIDLQELGKYEQYIKWP

SEQ ID NO: 42 - protein, 1219 aa, synthetic construct
  REGION 1..1219: note = RECOMBINANT SPIKE PROTEIN
MFVFLVLLPLVSSQCVNLTTRTQLPPAYTNSFTRGVYYPDKVFRSSVLHSTQDLFLPFFSNVTWFHAIHVSGTNGTKRFDNPVLPFNDGVYFASTEKSNIIRGWIFGTTLDSKTQSLLIVNNATNVVIKVCEFQFCNDPFLGVYYHKNNKSWMESEFRVYSSANNCTFEYVSQPFLMDLEGKQGNFKNLREFVFKNIDGYFKIYSKHTPINLVRDLPQGFSALEPLVDLPIGINITRFQTLLALHRSYLTPGDSSSGWTAGAAAYYVGYLQPRTFLLKYNENGTITDAVDCALDPLSETKCTLKSFTVEKGIYQTSNFRVQPTESIVRFPNITNLCPFGEVFNATRFASVYAWNRKRISNCVADYSVLYNSASFSTFKCYGVSPTKLNDLCFTNVYADSFVIRGDEVRQIAPGQTGKIADYNYKLPDDFTGCVIAWNSNNLDSKVGGNYNYLYRLFRKSNLKPFERDISTEIYQAGSTPCNGVEGFNCYFPLQSYGFQPTNGVGYQPYRVVVLSFELLHAPATVCGPKKSTNLVKNKCVNFNFNGLTGTGVLTESNKKFLPFQQFGRDIADTTDAVRDPQTLEILDITPCSFGGVSVITPGTNTSNQVAVLYQDVNCTEVPVAIHADQLTPTWRVYSTGSNVFQTRAGCLIGAEHVNNSYECDIPIGAGICASYQTQTNSPRRARSVASQSIIAYTMSLGAENSVAYSNNSIAIPTNFTISVTTEILPVSMTKTSVDCTMYICGDSTECSNLLLQYGSFCTQLNRALTGIAVEQDKNTQEVFAQVKQIYKTPPIKDFGGFNFSQILPDPSKPSKRSFIEDLLFNKVTLADAGFIKQYGDCLGDIAARDLICAQKFNGLTVLPPLLTDEMIAQYTSALLAGTITSGWTFGAGAALQIPFAMQMAYRFNGIGVTQNVLYENQKLIANQFNSAIGKIQDSLSSTASALGKLQDVVNQNAQALNTLVKQLSSNFGAISSVLNDILSRLDKVEAEVQIDRLITGRLQSLQTYVTQQLIRAAEIRASANLAATKMSECVLGQSKRVDFCGKGYHLMSFPQSAPHGVVFLHVTYVPAQEKNFTTAPAICHDGKAHFPREGVFVSNGTHWFVTQRNFYEPQIITTDNTFVSGNCDVVIGIVNNTVYDPLQPELDSFKEELDKYFKNHTSPDVDLGDISGINASVVNIQKEIDRLNEVAKNLNESLIDLQELGKYEQYIKWPHHHHHH

SEQ ID NO: 43 - DNA, 3657 bp, synthetic construct
  misc_feature 1..3657: note = RECOMBINANT SPIKE PROTEIN
  source 1..3657: mol_type = other DNA
atgttcgtcttcctggtgctgctgcccctggtgtccagccagtgcgtgaacctgaccactaggactcagctgcctcccgcttacaccaactcattcactcgcggtgtgtactaccctgacaaggtcttccgttcttcagtgctgcactcaactcaggacctgttcctgcccttcttctccaacgtcacctggttccacgccatccacgtgtccggcaccaacggcactaagcgcttcgacaacccagtgctgcctttcaacgacggtgtctacttcgcttcaaccgagaagtccaacatcatccgtggatggatcttcggcaccactctggacagcaagactcagtctctgctgatcgtcaacaacgccaccaacgtggtcatcaaggtctgcgaattccagttctgcaacgacccattcctgggcgtctactaccacaagaacaacaagtcatggatggagtccgaattccgcgtctactccagcgctaacaactgcactttcgagtacgtgtcccagcctttcctgatggacctggaaggaaagcagggtaacttcaagaacctgagggagttcgtgttcaagaacatcgacggatacttcaagatttacagcaagcacaccccaatcaacctggtgcgcgacctgcctcagggtttctctgctctggagccactggtggacctgcctatcggcatcaacatcacccgcttccagactctgctggctctgcaccgttcctacctgactccaggcgactcatcttctggatggactgctggagctgctgcttactacgtgggctacctgcagcctcgcaccttcctgctgaagtacaacgaaaacggaaccatcactgacgccgtcgactgcgctctggaccctctgtcagaaaccaagtgcactctgaagtccttcaccgtggagaagggcatctaccagacttcaaacttcagggtgcagcccaccgaatccatcgtcagattccctaacatcactaacctgtgccccttcggagaggtcttcaacgccacccgcttcgcttccgtgtacgcctggaacaggaagagaatctcaaactgcgtcgctgactactccgtgctgtacaactcagcctccttcagcaccttcaagtgctacggcgtgtcaccaactaagctgaacgacctgtgcttcaccaacgtctacgccgactccttcgtgatcaggggagacgaggtcagacagatcgctcctggccagactggaaagatcgccgactacaactacaagctgcccgacgacttcaccggttgcgtcatcgcttggaacagcaacaacctggactctaaagtgggtggcaactacaactacctgtaccgcctgttccgtaagtcaaacctgaagccattcgagagggacatcagcactgaaatctaccaggccggatctaccccttgcaacggtgtcgagggcttcaactgctacttccccctgcagtcctacggtttccagccaactaacggtgtgggctaccagccttacagagtggtcgtgctgagcttcgaactgctccacgctcctgctactgtgtgcggtccaaagaagtctaccaacctggtcaagaacaagtgcgtgaacttcaacttcaacggcctgaccggaactggtgtcctgaccgagagcaacaagaagttcctgcccttccagcagttcggaagggacatcgctgacaccactgacgctgtgcgcgaccctcagaccctggaaatcctggacatcactccatgctcattcggaggtgtctccgtgatcacccctggcaccaacacttctaaccaggtcgctgtgctgtaccaggacgtcaactgcaccgaggtccctgtggccatccacgctgaccagctgacccccacttggcgcgtgtactccaccggcagcaacgtgttccagactcgtgctggttgcctgatcggcgccgagcacgtgaacaacagctacgaatgcgacatccccatcggcgctggaatctgcgcctcttaccagacccagactaacagcccacgcagggctcgctctgtggcctctcagtcaatcatcgcttacaccatgtcactgggcgctgaaaactccgtggcctactctaacaactcaatcgccatccccaccaacttcactatcagcgtgaccactgagatcctgccagtcagcatgaccaagacttctgtggactgcactatgtacatctgcggagacagcaccgaatgctctaacctgctgctgcagtacggctctttctgcacccagctgaaccgtgctctgactggaatcgccgtggagcaggacaagaacactcaggaagtcttcgctcaggtgaagcaaatctacaagaccccacctatcaaggacttcggcggattcaacttctcccagatcctgcctgacccctccaagccaagcaagcgctctttcatcgaggacctgctgttcaacaaggtcactctggccgacgctggattcatcaagcagtacggagactgcctgggtgacatcgccgctcgtgacctgatctgcgctcagaagttcaacggtctgaccgtgctgcccccactgctgactgacgaaatgatcgcccagtacactagcgccctgctggctggaaccatcacttctggttggaccttcggtgctggcgccgctctgcagatccctttcgctatgcagatggcctaccgtttcaacggaatcggtgtcacccagaacgtgctgtacgagaaccagaagctgatcgctaaccagttcaactcagccatcggaaagatccaggacagcctgagctctactgcctctgctctgggcaagctgcaggacgtcgtgaaccagaacgcccaggctctgaacaccctggtcaagcagctgtcatccaacttcggtgctatcagctctgtgctgaacgacatcctgtcccgcctggacaaggtcgaggccgaagtgcagatcgaccgcctgatcactggccgtctgcagtcactgcagacctacgtgactcagcagctgatcagggccgctgaaatcagagcctccgctaacctggccgctaccaagatgagcgagtgcgtcctgggtcaatctaagcgtgtggacttctgcggcaagggataccacctgatgtcattccctcagtctgctccccacggtgtggtgttcctgcacgtcacctacgtgccagcccaggagaagaacttcaccactgcccctgctatctgccacgacggcaaggctcacttccccagggaaggtgtcttcgtgagcaacggcacccactggttcgtcactcagagaaacttctacgagccacagatcatcaccactgacaacactttcgtgtctggaaactgcgacgtggtcatcggtatcgtcaacaacaccgtgtacgaccccctgcagccagagctggactcattcaaggaggaactggacaagtacttcaagaaccacacctcccctgacgtcgacctgggcgacatctcaggaatcaacgcttccgtcgtgaacatccagaaggagatcgaccgcctgaacgaagtggccaagaacctgaacgaaagcctgatcgacctgcaggagctgggcaagtacgaacagtacatcaagtggcctcaccaccaccaccaccac

SEQ ID NO: 44 - protein, 1219 aa, synthetic construct; identical to SEQ ID NO: 42
  REGION 1..1219: note = RECOMBINANT SPIKE PROTEIN

SEQ ID NO: 45 - protein, 318 aa, synthetic construct
  REGION 1..318: note = RECOMBINANT SPIKE PROTEIN
QCVNLTTRTQLPPAYTNSFTRGVYYPDKVFRSSVLHSTQDLFLPFFSNVTWFHAIHVSGTNGTKRFDNPVLPFNDGVYFASTEKSNIIRGWIFGTTLDSKTQSLLIVNNATNVVIKVCEFQFCNDPFLGVYYHKNNKSWMESEFRVYSSANNCTFEYVSQPFLMDLEGKQGNFKNLREFVFKNIDGYFKIYSKHTPINLVRDLPQGFSALEPLVDLPIGINITRFQTLLALHRSYLTPGDSSSGWTAGAAAYYVGYLQPRTFLLKYNENGTITDAVDCALDPLSETKCTLKSFTVEKGIYQTSNFRVQPTESIVRFPN

SEQ ID NO: 46 - protein, 955 aa, synthetic construct
  REGION 1..955: note = RECOMBINANT SPIKE PROTEIN
MFVFLVLLPLVSSITNLCPFGEVFNATRFASVYAWNRKRISNCVADYSVLYNSASFSTFKCYGVSPTKLNDLCFTNVYADSFVIRGDEVRQIAPGQTGKIADYNYKLPDDFTGCVIAWNSNNLDSKVGGNYNYLYRLFRKSNLKPFERDISTEIYQAGSTPCNGVEGFNCYFPLQSYGFQPTNGVGYQPYRVVVLSFELLHAPATVCGPKKSTNLVKNKCVNFNFNGLTGTGVLTESNKKFLPFQQFGRDIADTTDAVRDPQTLEILDITPCSFGGVSVITPGTNTSNQVAVLYQDVNCTEVPVAIHADQLTPTWRVYSTGSNVFQTRAGCLIGAEHVNNSYECDIPIGAGICASYQTQTNSPRRARSVASQSIIAYTMSLGAENSVAYSNNSIAIPTNFTISVTTEILPVSMTKTSVDCTMYICGDSTECSNLLLQYGSFCTQLNRALTGIAVEQDKNTQEVFAQVKQIYKTPPIKDFGGFNFSQILPDPSKPSKRSFIEDLLFNKVTLADAGFIKQYGDCLGDIAARDLICAQKFNGLTVLPPLLTDEMIAQYTSALLAGTITSGWTFGAGAALQIPFAMQMAYRFNGIGVTQNVLYENQKLIANQFNSAIGKIQDSLSSTASALGKLQDVVNQNAQALNTLVKQLSSNFGAISSVLNDILSRLDKVEAEVQIDRLITGRLQSLQTYVTQQLIRAAEIRASANLAATKMSECVLGQSKRVDFCGKGYHLMSFPQSAPHGVVFLHVTYVPAQEKNFTTAPAICHDGKAHFPREGVFVSNGTHWFVTQRNFYEPQIITTDNTFVSGNCDVVIGIVNNTVYDPLQPELDSFKEELDKYFKNHTSPDVDLGDISGINASVVNIQKEIDRLNEVAKNLNESLIDLQELGKYEQYIKWPWYIWLGFIAGLIAIVMVTIMLCCMTSCCSCLKGCCSCGSCCKFDEDDSEPVLKGVKLHYT

SEQ ID NO: 47 - DNA, 2868 bp, synthetic construct
  misc_feature 1..2868: note = RECOMBINANT SPIKE PROTEIN
  source 1..2868: mol_type = other DNA
atgttcgtcttcctggtgctgctgcccctggtgtccagcatcactaacctgtgccccttcggagaggtcttcaacgccacccgcttcgcttccgtgtacgcctggaacaggaagagaatctcaaactgcgtcgctgactactccgtgctgtacaactcagcctccttcagcaccttcaagtgctacggcgtgtcaccaactaagctgaacgacctgtgcttcaccaacgtctacgccgactccttcgtgatcaggggagacgaggtcagacagatcgctcctggccagactggaaagatcgccgactacaactacaagctgcccgacgacttcaccggttgcgtcatcgcttggaacagcaacaacctggactctaaagtgggtggcaactacaactacctgtaccgcctgttccgtaagtcaaacctgaagccattcgagagggacatcagcactgaaatctaccaggccggatctaccccttgcaacggtgtcgagggcttcaactgctacttccccctgcagtcctacggtttccagccaactaacggtgtgggctaccagccttacagagtggtcgtgctgagcttcgaactgctccacgctcctgctactgtgtgcggtccaaagaagtctaccaacctggtcaagaacaagtgcgtgaacttcaacttcaacggcctgaccggaactggtgtcctgaccgagagcaacaagaagttcctgcccttccagcagttcggaagggacatcgctgacaccactgacgctgtgcgcgaccctcagaccctggaaatcctggacatcactccatgctcattcggaggtgtctccgtgatcacccctggcaccaacacttctaaccaggtcgctgtgctgtaccaggacgtcaactgcaccgaggtccctgtggccatccacgctgaccagctgacccccacttggcgcgtgtactccaccggcagcaacgtgttccagactcgtgctggttgcctgatcggcgccgagcacgtgaacaacagctacgaatgcgacatccccatcggcgctggaatctgcgcctcttaccagacccagactaacagcccacgcagggctcgctctgtggcctctcagtcaatcatcgcttacaccatgtcactgggcgctgaaaactccgtggcctactctaacaactcaatcgccatccccaccaacttcactatcagcgtgaccactgagatcctgccagtcagcatgaccaagacttctgtggactgcactatgtacatctgcggagacagcaccgaatgctctaacctgctgctgcagtacggctctttctgcacccagctgaaccgtgctctgactggaatcgccgtggagcaggacaagaacactcaggaagtcttcgctcaggtgaagcaaatctacaagaccccacctatcaaggacttcggcggattcaacttctcccagatcctgcctgacccctccaagccaagcaagcgctctttcatcgaggacctgctgttcaacaaggtcactctggccgacgctggattcatcaagcagtacggagactgcctgggtgacatcgccgctcgtgacctgatctgcgctcagaagttcaacggtctgaccgtgctgcccccactgctgactgacgaaatgatcgcccagtacactagcgccctgctggctggaaccatcacttctggttggaccttcggtgctggcgccgctctgcagatccctttcgctatgcagatggcctaccgtttcaacggaatcggtgtcacccagaacgtgctgtacgagaaccagaagctgatcgctaaccagttcaactcagccatcggaaagatccaggacagcctgagctctactgcctctgctctgggcaagctgcaggacgtcgtgaaccagaacgcccaggctctgaacaccctggtcaagcagctgtcatccaacttcggtgctatcagctctgtgctgaacgacatcctgtcccgcctggacaaggtcgaggccgaagtgcagatcgaccgcctgatcactggccgtctgcagtcactgcagacctacgtgactcagcagctgatcagggccgctgaaatcagagcctccgctaacctggccgctaccaagatgagcgagtgcgtcctgggtcaatctaagcgtgtggacttctgcggcaagggataccacctgatgtcattccctcagtctgctccccacggtgtggtgttcctgcacgtcacctacgtgccagcccaggagaagaacttcaccactgcccctgctatctgccacgacggcaaggctcacttccccagggaaggtgtcttcgtgagcaacggcacccactggttcgtcactcagagaaacttctacgagccacagatcatcaccactgacaacactttcgtgtctggaaactgcgacgtggtcatcggtatcgtcaacaacaccgtgtacgaccccctgcagccagagctggactcattcaaggaggaactggacaagtacttcaagaaccacacctcccctgacgtcgacctgggcgacatctcaggaatcaacgcttccgtcgtgaacatccagaaggagatcgaccgcctgaacgaagtggccaagaacctgaacgaaagcctgatcgacctgcaggagctgggcaagtacgaacagtacatcaagtggccttggtacatctggctgggtttcatcgctggcctcatcgctatcgtgatggtgaccatcatgctgtgctgcatgacttcatgctgctcctgcctgaagggctgctgcagctgcggatcttgctgcaagttcgacgaggacgactctgaacccgtcctgaagggcgtgaagctgcactacacctaa

SEQ ID NO: 48 - protein, 942 aa, synthetic construct
  REGION 1..942: note = RECOMBINANT SPIKE PROTEIN
ITNLCPFGEVFNATRFASVYAWNRKRISNCVADYSVLYNSASFSTFKCYGVSPTKLNDLCFTNVYADSFVIRGDEVRQIAPGQTGKIADYNYKLPDDFTGCVIAWNSNNLDSKVGGNYNYLYRLFRKSNLKPFERDISTEIYQAGSTPCNGVEGFNCYFPLQSYGFQPTNGVGYQPYRVVVLSFELLHAPATVCGPKKSTNLVKNKCVNFNFNGLTGTGVLTESNKKFLPFQQFGRDIADTTDAVRDPQTLEILDITPCSFGGVSVITPGTNTSNQVAVLYQDVNCTEVPVAIHADQLTPTWRVYSTGSNVFQTRAGCLIGAEHVNNSYECDIPIGAGICASYQTQTNSPRRARSVASQSIIAYTMSLGAENSVAYSNNSIAIPTNFTISVTTEILPVSMTKTSVDCTMYICGDSTECSNLLLQYGSFCTQLNRALTGIAVEQDKNTQEVFAQVKQIYKTPPIKDFGGFNFSQILPDPSKPSKRSFIEDLLFNKVTLADAGFIKQYGDCLGDIAARDLICAQKFNGLTVLPPLLTDEMIAQYTSALLAGTITSGWTFGAGAALQIPFAMQMAYRFNGIGVTQNVLYENQKLIANQFNSAIGKIQDSLSSTASALGKLQDVVNQNAQALNTLVKQLSSNFGAISSVLNDILSRLDKVEAEVQIDRLITGRLQSLQTYVTQQLIRAAEIRASANLAATKMSECVLGQSKRVDFCGKGYHLMSFPQSAPHGVVFLHVTYVPAQEKNFTTAPAICHDGKAHFPREGVFVSNGTHWFVTQRNFYEPQIITTDNTFVSGNCDVVIGIVNNTVYDPLQPELDSFKEELDKYFKNHTSPDVDLGDISGINASVVNIQKEIDRLNEVAKNLNESLIDLQELGKYEQYIKWPWYIWLGFIAGLIAIVMVTIMLCCMTSCCSCLKGCCSCGSCCKFDEDDSEPVLKGVKLHYT

SEQ ID NO: 49 - protein, 960 aa, synthetic construct
  REGION 1..960: note = RECOMBINANT SPIKE PROTEIN
MFVFLVLLPLVSSITNLCPFGEVFNATRFASVYAWNRKRISNCVADYSVLYNSASFSTFKCYGVSPTKLNDLCFTNVYADSFVIRGDEVRQIAPGQTGKIADYNYKLPDDFTGCVIAWNSNNLDSKVGGNYNYLYRLFRKSNLKPFERDISTEIYQAGSTPCNGVEGFNCYFPLQSYGFQPTNGVGYQPYRVVVLSFELLHAPATVCGPKKSTNLVKNKCVNFNFNGLTGTGVLTESNKKFLPFQQFGRDIADTTDAVRDPQTLEILDITPCSFGGVSVITPGTNTSNQVAVLYQDVNCTEVPVAIHADQLTPTWRVYSTGSNVFQTRAGCLIGAEHVNNSYECDIPIGAGICASYQTQTNSPRRARSVASQSIIAYTMSLGAENSVAYSNNSIAIPTNFTISVTTEILPVSMTKTSVDCTMYICGDSTECSNLLLQYGSFCTQLNRALTGIAVEQDKNTQEVFAQVKQIYKTPPIKDFGGFNFSQILPDPSKPSKRSFIEDLLFNKVTLADAGFIKQYGDCLGDIAARDLICAQKFNGLTVLPPLLTDEMIAQYTSALLAGTITSGWTFGAGAALQIPFAMQMAYRFNGIGVTQNVLYENQKLIANQFNSAIGKIQDSLSSTASALGKLQDVVNQNAQALNTLVKQLSSNFGAISSVLNDILSRLDKVEAEVQIDRLITGRLQSLQTYVTQQLIRAAEIRASANLAATKMSECVLGQSKRVDFCGKGYHLMSFPQSAPHGVVFLHVTYVPAQEKNFTTAPAICHDGKAHFPREGVFVSNGTHWFVTQRNFYEPQIITTDNTFVSGNCDVVIGIVNNTVYDPLQPELDSFKEELDKYFKNHTSPDVDLGDISGINASVVNIQKEIDRLNEVAKNLNESLIDLQELGKYEQYIKWPWYIWLGFIAGLIAIVMVTIMLCCMTSCCSCLKGCCSCGSCCKFDEDDSEPVLKGVKLHYTHHHHH

SEQ ID NO: 50 - DNA, 2883 bp, synthetic construct
  misc_feature 1..2883: note = RECOMBINANT SPIKE PROTEIN
  source 1..2883: mol_type = other DNA
atgttcgtcttcctggtgctgctgcccctggtgtccagcatcactaacctgtgccccttcggagaggtcttcaacgccacccgcttcgcttccgtgtacgcctggaacaggaagagaatctcaaactgcgtcgctgactactccgtgctgtacaactcagcctccttcagcaccttcaagtgctacggcgtgtcaccaactaagctgaacgacctgtgcttcaccaacgtctacgccgactccttcgtgatcaggggagacgaggtcagacagatcgctcctggccagactggaaagatcgccgactacaactacaagctgcccgacgacttcaccggttgcgtcatcgcttggaacagcaacaacctggactctaaagtgggtggcaactacaactacctgtaccgcctgttccgtaagtcaaacctgaagccattcgagagggacatcagcactgaaatctaccaggccggatctaccccttgcaacggtgtcgagggcttcaactgctacttccccctgcagtcctacggtttccagccaactaacggtgtgggctaccagccttacagagtggtcgtgctgagcttcgaactgctccacgctcctgctactgtgtgcggtccaaagaagtctaccaacctggtcaagaacaagtgcgtgaacttcaacttcaacggcctgaccggaactggtgtcctgaccgagagcaacaagaagttcctgcccttccagcagttcggaagggacatcgctgacaccactgacgctgtgcgcgaccctcagaccctggaaatcctggacatcactccatgctcattcggaggtgtctccgtgatcacccctggcaccaacacttctaaccaggtcgctgtgctgtaccaggacgtcaactgcaccgaggtccctgtggccatccacgctgaccagctgacccccacttggcgcgtgtactccaccggcagcaacgtgttccagactcgtgctggttgcctgatcggcgccgagcacgtgaacaacagctacgaatgcgacatccccatcggcgctggaatctgcgcctcttaccagacccagactaacagcccacgcagggctcgctctgtggcctctcagtcaatcatcgcttacaccatgtcactgggcgctgaaaactccgtggcctactctaacaactcaatcgccatccccaccaacttcactatcagcgtgaccactgagatcctgccagtcagcatgaccaagacttctgtggactgcactatgtacatctgcggagacagcaccgaatgctctaacctgctgctgcagtacggctctttctgcacccagctgaaccgtgctctgactggaatcgccgtggagcaggacaagaacactcaggaagtcttcgctcaggtgaagcaaatctacaagaccccacctatcaaggacttcggcggattcaacttctcccagatcctgcctgacccctccaagccaagcaagcgctctttcatcgaggacctgctgttcaacaaggtcactctggccgacgctggattcatcaagcagtacggagactgcctgggtgacatcgccgctcgtgacctgatctgcgctcagaagttcaacggtctgaccgtgctgcccccactgctgactgacgaaatgatcgcccagtacactagcgccctgctggctggaaccatcacttctggttggaccttcggtgctggcgccgctctgcagatccctttcgctatgcagatggcctaccgtttcaacggaatcggtgtcacccagaacgtgctgtacgagaaccagaagctgatcgctaaccagttcaactcagccatcggaaagatccaggacagcctgagctctactgcctctgctctgggcaagctgcaggacgtcgtgaaccagaacgcccaggctctgaacaccctggtcaagcagctgtcatccaacttcggtgctatcagctctgtgctgaacgacatcctgtcccgcctggacaaggtcgaggccgaagtgcagatcgaccgcctgatcactggccgtctgcagtcactgcagacctacgtgactcagcagctgatcagggccgctgaaatcagagcctccgctaacctggccgctaccaagatgagcgagtgcgtcctgggtcaatctaagcgtgtggacttctgcggcaagggataccacctgatgtcattccctcagtctgctccccacggtgtggtgttcctgcacgtcacctacgtgccagcccaggagaagaacttcaccactgcccctgctatctgccacgacggcaaggctcacttccccagggaaggtgtcttcgtgagcaacggcacccactggttcgtcactcagagaaacttctacgagccacagatcatcaccactgacaacactttcgtgtctggaaactgcgacgtggtcatcggtatcgtcaacaacaccgtgtacgaccccctgcagccagagctggactcattcaaggaggaactggacaagtacttcaagaaccacacctcccctgacgtcgacctgggcgacatctcaggaatcaacgcttccgtcgtgaacatccagaaggagatcgaccgcctgaacgaagtggccaagaacctgaacgaaagcctgatcgacctgcaggagctgggcaagtacgaacagtacatcaagtggccttggtacatctggctgggtttcatcgctggcctcatcgctatcgtgatggtgaccatcatgctgtgctgcatgacttcatgctgctcctgcctgaagggctgctgcagctgcggatcttgctgcaagttcgacgaggacgactctgaacccgtcctgaagggcgtgaagctgcactacacccaccaccaccaccaccac

SEQ ID NO: 51 - protein, 947 aa, synthetic construct
  REGION 1..947: note = RECOMBINANT SPIKE PROTEIN
ITNLCPFGEVFNATRFASVYAWNRKRISNCVADYSVLYNSASFSTFKCYGVSPTKLNDLCFTNVYADSFVIRGDEVRQIAPGQTGKIADYNYKLPDDFTGCVIAWNSNNLDSKVGGNYNYLYRLFRKSNLKPFERDISTEIYQAGSTPCNGVEGFNCYFPLQSYGFQPTNGVGYQPYRVVVLSFELLHAPATVCGPKKSTNLVKNKCVNFNFNGLTGTGVLTESNKKFLPFQQFGRDIADTTDAVRDPQTLEILDITPCSFGGVSVITPGTNTSNQVAVLYQDVNCTEVPVAIHADQLTPTWRVYSTGSNVFQTRAGCLIGAEHVNNSYECDIPIGAGICASYQTQTNSPRRARSVASQSIIAYTMSLGAENSVAYSNNSIAIPTNFTISVTTEILPVSMTKTSVDCTMYICGDSTECSNLLLQYGSFCTQLNRALTGIAVEQDKNTQEVFAQVKQIYKTPPIKDFGGFNFSQILPDPSKPSKRSFIEDLLFNKVTLADAGFIKQYGDCLGDIAARDLICAQKFNGLTVLPPLLTDEMIAQYTSALLAGTITSGWTFGAGAALQIPFAMQMAYRFNGIGVTQNVLYENQKLIANQFNSAIGKIQDSLSSTASALGKLQDVVNQNAQALNTLVKQLSSNFGAISSVLNDILSRLDKVEAEVQIDRLITGRLQSLQTYVTQQLIRAAEIRASANLAATKMSECVLGQSKRVDFCGKGYHLMSFPQSAPHGVVFLHVTYVPAQEKNFTTAPAICHDGKAHFPREGVFVSNGTHWFVTQRNFYEPQIITTDNTFVSGNCDVVIGIVNNTVYDPLQPELDSFKEELDKYFKNHTSPDVDLGDISGINASVVNIQKEIDRLNEVAKNLNESLIDLQELGKYEQYIKWPWYIWLGFIAGLIAIVMVTIMLCCMTSCCSCLKGCCSCGSCCKFDEDDSEPVLKGVKLHYTHHHHH

SEQ ID NO: 52 - protein, 901 aa, synthetic construct
  REGION 1..901: note = RECOMBINANT SPIKE PROTEIN
MFVFLVLLPLVSSITNLCPFGEVFNATRFASVYAWNRKRISNCVADYSVLYNSASFSTFKCYGVSPTKLNDLCFTNVYADSFVIRGDEVRQIAPGQTGKIADYNYKLPDDFTGCVIAWNSNNLDSKVGGNYNYLYRLFRKSNLKPFERDISTEIYQAGSTPCNGVEGFNCYFPLQSYGFQPTNGVGYQPYRVVVLSFELLHAPATVCGPKKSTNLVKNKCVNFNFNGLTGTGVLTESNKKFLPFQQFGRDIADTTDAVRDPQTLEILDITPCSFGGVSVITPGTNTSNQVAVLYQDVNCTEVPVAIHADQLTPTWRVYSTGSNVFQTRAGCLIGAEHVNNSYECDIPIGAGICASYQTQTNSPRRARSVASQSIIAYTMSLGAENSVAYSNNSIAIPTNFTISVTTEILPVSMTKTSVDCTMYICGDSTECSNLLLQYGSFCTQLNRALTGIAVEQDKNTQEVFAQVKQIYKTPPIKDFGGFNFSQILPDPSKPSKRSFIEDLLFNKVTLADAGFIKQYGDCLGDIAARDLICAQKFNGLTVLPPLLTDEMIAQYTSALLAGTITSGWTFGAGAALQIPFAMQMAYRFNGIGVTQNVLYENQKLIANQFNSAIGKIQDSLSSTASALGKLQDVVNQNAQALNTLVKQLSSNFGAISSVLNDILSRLDKVEAEVQIDRLITGRLQSLQTYVTQQLIRAAEIRASANLAATKMSECVLGQSKRVDFCGKGYHLMSFPQSAPHGVVFLHVTYVPAQEKNFTTAPAICHDGKAHFPREGVFVSNGTHWFVTQRNFYEPQIITTDNTFVSGNCDVVIGIVNNTVYDPLQPELDSFKEELDKYFKNHTSPDVDLGDISGINASVVNIQKEIDRLNEVAKNLNESLIDLQELGKYEQYIKWPHHHHHH

SEQ ID NO: 53 - DNA, 2706 bp, synthetic construct
  misc_feature 1..2706: note = RECOMBINANT SPIKE PROTEIN
  source 1..2706: mol_type = other DNA
atgttcgtcttcctggtgctgctgcccctggtgtccagcatcactaacctgtgccccttcggagaggtcttcaacgccacccgcttcgcttccgtgtacgcctggaacaggaagagaatctcaaactgcgtcgctgactactccgtgctgtacaactcagcctccttcagcaccttcaagtgctacggcgtgtcaccaactaagctgaacgacctgtgcttcaccaacgtctacgccgactccttcgtgatcaggggagacgaggtcagacagatcgctcctggccagactggaaagatcgccgactacaactacaagctgcccgacgacttcaccggttgcgtcatcgcttggaacagcaacaacctggactctaaagtgggtggcaactacaactacctgtaccgcctgttccgtaagtcaaacctgaagccattcgagagggacatcagcactgaaatctaccaggccggatctaccccttgcaacggtgtcgagggcttcaactgctacttccccctgcagtcctacggtttccagccaactaacggtgtgggctaccagccttacagagtggtcgtgctgagcttcgaactgctccacgctcctgctactgtgtgcggtccaaagaagtctaccaacctggtcaagaacaagtgcgtgaacttcaacttcaacggcctgaccggaactggtgtcctgaccgagagcaacaagaagttcctgcccttccagcagttcggaagggacatcgctgacaccactgacgctgtgcgcgaccctcagaccctggaaatcctggacatcactccatgctcattcggaggtgtctccgtgatcacccctggcaccaacacttctaaccaggtcgctgtgctgtaccaggacgtcaactgcaccgaggtccctgtggccatccacgctgaccagctgacccccacttggcgcgtgtactccaccggcagcaacgtgttccagactcgtgctggttgcctgatcggcgccgagcacgtgaacaacagctacgaatgcgacatccccatcggcgctggaatctgcgcctcttaccagacccagactaacagcccacgcagggctcgctctgtggcctctcagtcaatcatcgcttacaccatgtcactgggcgctgaaaactccgtggcctactctaacaactcaatcgccatccccaccaacttcactatcagcgtgaccactgagatcctgccagtcagcatgaccaagacttctgtggactgcactatgtacatctgcggagacagcaccgaatgctctaacctgctgctgcagtacggctctttctgcacccagctgaaccgtgctctgactggaatcgccgtggagcaggacaagaacactcaggaagtcttcgctcaggtgaagcaaatctacaagaccccacctatcaaggacttcggcggattcaacttctcccagatcctgcctgacccctccaagccaagcaagcgctctttcatcgaggacctgctgttcaacaaggtcactctggccgacgctggattcatcaagcagtacggagactgcctgggtgacatcgccgctcgtgacctgatctgcgctcagaagttcaacggtctgaccgtgctgcccccactgctgactgacgaaatgatcgcccagtacactagcgccctgctggctggaaccatcacttctggttggaccttcggtgctggcgccgctctgcagatccctttcgctatgcagatggcctaccgtttcaacggaatcggtgtcacccagaacgtgctgtacgagaaccagaagctgatcgctaaccagttcaactcagccatcggaaagatccaggacagcctgagctctactgcctctgctctgggcaagctgcaggacgtcgtgaaccagaacgcccaggctctgaacaccctggtcaagcagctgtcatccaacttcggtgctatcagctctgtgctgaacgacatcctgtcccgcctggacaaggtcgaggccgaagtgcagatcgaccgcctgatcactggccgtctgcagtcactgcagacctacgtgactcagcagctgatcagggccgctgaaatcagagcctccgctaacctggccgctaccaagatgagcgagtgcgtcctgggtcaatctaagcgtgtggacttctgcggcaagggataccacctgatgtcattccctcagtctgctccccacggtgtggtgttcctgcacgtcacctacgtgccagcccaggagaagaacttcaccactgcccctgctatctgccacgacggcaaggctcacttccccagggaaggtgtcttcgtgagcaacggcacccactggttcgtcactcagagaaacttctacgagccacagatcatcaccactgacaacactttcgtgtctggaaactgcgacgtggtcatcggtatcgtcaacaacaccgtgtacgaccccctgcagccagagctggactcattcaaggaggaactggacaagtacttcaagaaccacacctcccctgacgtcgacctgggcgacatctcaggaatcaacgcttccgtcgtgaacatccagaaggagatcgaccgcctgaacgaagtggccaagaacctgaacgaaagcctgatcgacctgcaggagctgggcaagtacgaacagtacatcaagtggcctcaccaccaccaccaccaccac

SEQ ID NO: 54 - protein, 888 aa, synthetic construct
  REGION 1..888: note = RECOMBINANT SPIKE PROTEIN
ITNLCPFGEVFNATRFASVYAWNRKRISNCVADYSVLYNSASFSTFKCYGVSPTKLNDLCFTNVYADSFVIRGDEVRQIAPGQTGKIADYNYKLPDDFTGCVIAWNSNNLDSKVGGNYNYLYRLFRKSNLKPFERDISTEIYQAGSTPCNGVEGFNCYFPLQSYGFQPTNGVGYQPYRVVVLSFELLHAPATVCGPKKSTNLVKNKCVNFNFNGLTGTGVLTESNKKFLPFQQFGRDIADTTDAVRDPQTLEILDITPCSFGGVSVITPGTNTSNQVAVLYQDVNCTEVPVAIHADQLTPTWRVYSTGSNVFQTRAGCLIGAEHVNNSYECDIPIGAGICASYQTQTNSPRRARSVASQSIIAYTMSLGAENSVAYSNNSIAIPTNFTISVTTEILPVSMTKTSVDCTMYICGDSTECSNLLLQYGSFCTQLNRALTGIAVEQDKNTQEVFAQVKQIYKTPPIKDFGGFNFSQILPDPSKPSKRSFIEDLLFNKVTLADAGFIKQYGDCLGDIAARDLICAQKFNGLTVLPPLLTDEMIAQYTSALLAGTITSGWTFGAGAALQIPFAMQMAYRFNGIGVTQNVLYENQKLIANQFNSAIGKIQDSLSSTASALGKLQDVVNQNAQALNTLVKQLSSNFGAISSVLNDILSRLDKVEAEVQIDRLITGRLQSLQTYVTQQLIRAAEIRASANLAATKMSECVLGQSKRVDFCGKGYHLMSFPQSAPHGVVFLHVTYVPAQEKNFTTAPAICHDGKAHFPREGVFVSNGTHWFVTQRNFYEPQIITTDNTFVSGNCDVVIGIVNNTVYDPLQPELDSFKEELDKYFKNHTSPDVDLGDISGINASVVNIQKEIDRLNEVAKNLNESLIDLQELGKYEQYIKWPHHHHHH

SEQ ID NO: 55 - DNA, 3819 bp, synthetic construct
  misc_feature 1..3819: note = RECOMBINANT SPIKE PROTEIN
  source 1..3819: mol_type = other DNA
atgttcgtcttcctggtgctgctgcccctggtgtccagccagtgcgtgaacctgaccactaggactcagctgcctcccgcttacaccaactcattcactcgcggtgtgtactaccctgacaaggtcttccgttcttcagtgctgcactcaactcaggacctgttcctgcccttcttctccaacgtcacctggttccacgccatccacgtgtccggcaccaacggcactaagcgcttcgacaacccagtgctgcctttcaacgacggtgtctacttcgcttcaaccgagaagtccaacatcatccgtggatggatcttcggcaccactctggacagcaagactcagtctctgctgatcgtcaacaacgccaccaacgtggtcatcaaggtctgcgaattccagttctgcaacgacccattcctgggcgtctactaccacaagaacaacaagtcatggatggagtccgaattccgcgtctactccagcgctaacaactgcactttcgagtacgtgtcccagcctttcctgatggacctggaaggaaagcagggtaacttcaagaacctgagggagttcgtgttcaagaacatcgacggatacttcaagatttacagcaagcacaccccaatcaacctggtgcgcgacctgcctcagggtttctctgctctggagccactggtggacctgcctatcggcatcaacatcacccgcttccagactctgctggctctgcaccgttcctacctgactccaggcgactcatcttctggatggactgctggagctgctgcttactacgtgggctacctgcagcctcgcaccttcctgctgaagtacaacgaaaacggaaccatcactgacgccgtcgactgcgctctggaccctctgtcagaaaccaagtgcactctgaagtccttcaccgtggagaagggcatctaccagacttcaaacttcagggtgcagcccaccgaatccatcgtcagattccctaacatcactaacctgtgccccttcggagaggtcttcaacgccacccgcttcgcttccgtgtacgcctggaacaggaagagaatctcaaactgcgtcgctgactactccgtgctgtacaactcagcctccttcagcaccttcaagtgctacggcgtgtcaccaactaagctgaacgacctgtgcttcaccaacgtctacgccgactccttcgtgatcaggggagacgaggtcagacagatcgctcctggccagactggaaagatcgccgactacaactacaagctgcccgacgacttcaccggttgcgtcatcgcttggaacagcaacaacctggactctaaagtgggtggcaactacaactacctgtaccgcctgttccgtaagtcaaacctgaagccattcgagagggacatcagcactgaaatctaccaggccggatctaccccttgcaacggtgtcgagggcttcaactgctacttccccctgcagtcctacggtttccagccaactaacggtgtgggctaccagccttacagagtggtcgtgctgagcttcgaactgctccacgctcctgctactgtgtgcggtccaaagaagtctaccaacctggtcaagaacaagtgcgtgaacttcaacttcaacggcctgaccggaactggtgtcctgaccgagagcaacaagaagttcctgcccttccagcagttcggaagggacatcgctgacaccactgacgctgtgcgcgaccctcagaccctggaaatcctggacatcactccatgctcattcggaggtgtctccgtgatcacccctggcaccaacacttctaaccaggtcgctgtgctgtaccaggacgtcaactgcaccgaggtccctgtggccatccacgctgaccagctgacccccacttggcgcgtgtactccaccggcagcaacgtgttccagactcgtgctggttgcctgatcggcgccgagcacgtgaacaacagctacgaatgcgacatccccatcggcgctggaatctgcgcctcttaccagacccagactaacagcccacagcaggctcagtctgtggcctctcagtcaatcatcgcttacaccatgtcactgggcgctgaaaactccgtggcctactctaacaactcaatcgccatccccaccaacttcactatcagcgtgaccactgagatcctgccagtcagcatgaccaagacttctgtggactgcactatgtacatctgcggagacagcaccgaatgctctaacctgctgctgcagtacggctctttctgcacccagctgaaccgtgctctgactggaatcgccgtggagcaggacaagaacactcaggaagtcttcgctcaggtgaagcaaatctacaagaccccacctatcaaggacttcggcggattcaacttctcccagatcctgcctgacccctccaagccaagcaagcgctctttcatcgaggacctgctgttcaacaaggtcactctggccgacgctggattcatcaagcagtacggagactgcctgggtgacatcgccgctcgtgacctgatctgcgctcagaagttcaacggtctgaccgtgctgcccccactgctgactgacgaaatgatcgcccagtacactagcgccctgctggctggaaccatcacttctggttggaccttcggtgctggcgccgctctgcagatccctttcgctatgcagatggcctaccgtttcaacggaatcggtgtcacccagaacgtgctgtacgagaaccagaagctgatcgctaaccagttcaactcagccatcggaaagatccaggacagcctgagctctactgcctctgctctgggcaagctgcaggacgtcgtgaaccagaacgcccaggctctgaacaccctggtcaagcagctgtcatccaacttcggtgctatcagctctgtgctgaacgacatcctgtcccgcctggacaaggtcgaggccgaagtgcagatcgaccgcctgatcactggccgtctgcagtcactgcagacctacgtgactcagcagctgatcagggccgctgaaatcagagcctccgctaacctggccgctaccaagatgagcgagtgcgtcctgggtcaatctaagcgtgtggacttctgcggcaagggataccacctgatgtcattccctcagtctgctccccacggtgtggtgttcctgcacgtcacctacgtgccagcccaggagaagaacttcaccactgcccctgctatctgccacgacggcaaggctcacttccccagggaaggtgtcttcgtgagcaacggcacccactggttcgtcactcagagaaacttctacgagccacagatcatcaccactgacaacactttcgtgtctggaaactgcgacgtggtcatcggtatcgtcaacaacaccgtgtacgaccccctgcagccagagctggactcattcaaggaggaactggacaagtacttcaagaaccacacctcccctgacgtcgacctgggcgacatctcaggaatcaacgcttccgtcgtgaacatccagaaggagatcgaccgcctgaacgaagtggccaagaacctgaacgaaagcctgatcgacctgcaggagctgggcaagtacgaacagtacatcaagtggccttggtacatctggctgggtttcatcgctggcctcatcgctatcgtgatggtgaccatcatgctgtgctgcatgacttcatgctgctcctgcctgaagggctgctgcagctgcggatcttgctgcaagttcgacgaggacgactctgaacccgtcctgaagggcgtgaagctgcactacacc

SEQ ID NO: 56 - protein, 1279 aa, synthetic construct
  REGION 1..1279: note = RECOMBINANT SPIKE PROTEIN
MFVFLVLLPLVSSQCVNLTTRTQLPPAYTNSFTRGVYYPDKVFRSSVLHSTQDLFLPFFSNVTWFHAIHVSGTNGTKRFDNPVLPFNDGVYFASTEKSNIIRGWIFGTTLDSKTQSLLIVNNATNVVIKVCEFQFCNDPFLGVYYHKNNKSWMESEFRVYSSANNCTFEYVSQPFLMDLEGKQGNFKNLREFVFKNIDGYFKIYSKHTPINLVRDLPQGFSALEPLVDLPIGINITRFQTLLALHRSYLTPGDSSSGWTAGAAAYYVGYLQPRTFLLKYNENGTITDAVDCALDPLSETKCTLKSFTVEKGIYQTSNFRVQPTESIVRFPNITNLCPFGEVFNATRFASVYAWNRKRISNCVADYSVLYNSASFSTFKCYGVSPTKLNDLCFTNVYADSFVIRGDEVRQIAPGQTGKIADYNYKLPDDFTGCVIAWNSNNLDSKVGGNYNYLYRLFRKSNLKPFERDISTEIYQAGSTPCNGVEGFNCYFPLQSYGFQPTNGVGYQPYRVVVLSFELLHAPATVCGPKKSTNLVKNKCVNFNFNGLTGTGVLTESNKKFLPFQQFGRDIADTTDAVRDPQTLEILDITPCSFGGVSVITPGTNTSNQVAVLYQDVNCTEVPVAIHADQLTPTWRVYSTGSNVFQTRAGCLIGAEHVNNSYECDIPIGAGICASYQTQTNSPQQAQSVASQSIIAYTMSLGAENSVAYSNNSIAIPTNFTISVTTEILPVSMTKTSVDCTMYICGDSTECSNLLLQYGSFCTQLNRALTGIAVEQDKNTQEVFAQVKQIYKTPPIKDFGGFNFSQILPDPSKPSKRSFIEDLLFNKVTLADAGFIKQYGDCLGDIAARDLICAQKFNGLTVLPPLLTDEMIAQYTSALLAGTITSGWTFGAGAALQIPFAMQMAYRFNGIGVTQNVLYENQKLIANQFNSAIGKIQDSLSSTASALGKLQDVVNQNAQALNTLVKQLSSNFGAISSVLNDILSRLDKVEAEVQIDRLITGRLQSLQTYVTQQLIRAAEIRASANLAATKMSECVLGQSKRVDFCGKGYHLMSFPQSAPHGVVFLHVTYVPAQEKNFTTAPAICHDGKAHFPREGVFVSNGTHWFVTQRNFYEPQIITTDNTFVSGNCDVVIGIVNNTVYDPLQPELDSFKEELDKYFKNHTSPDVDLGDISGINASVVNIQKEIDRLNEVAKNLNESLIDLQELGKYEQYIKWPWYIWLGFIAGLIAIVMVTIMLCCMTSCCSCLKGCCSCGSCCKFDEDDSEPVLKGVKLHYTHHHHHH

SEQ ID NO: 57 - DNA, 3837 bp, synthetic construct
  misc_feature 1..3837: note = RECOMBINANT SPIKE PROTEIN
  source 1..3837: mol_type = other DNA
atgttcgtcttcctggtgctgctgcccctggtgtccagccagtgcgtgaacctgaccactaggactcagctgcctcccgcttacaccaactcattcactcgcggtgtgtactaccctgacaaggtcttccgttcttcagtgctgcactcaactcaggacctgttcctgcccttcttctccaacgtcacctggttccacgccatccacgtgtccggcaccaacggcactaagcgcttcgacaacccagtgctgcctttcaacgacggtgtctacttcgcttcaaccgagaagtccaacatcatccgtggatggatcttcggcaccactctggacagcaagactcagtctctgctgatcgtcaacaacgccaccaacgtggtcatcaaggtctgcgaattccagttctgcaacgacccattcctgggcgtctactaccacaagaacaacaagtcatggatggagtccgaattccgcgtctactccagcgctaacaactgcactttcgagtacgtgtcccagcctttcctgatggacctggaaggaaagcagggtaacttcaagaacctgagggagttcgtgttcaagaacatcgacggatacttcaagatttacagcaagcacaccccaatcaacctggtgcgcgacctgcctcagggtttctctgctctggagccactggtggacctgcctatcggcatcaacatcacccgcttccagactctgctggctctgcaccgttcctacctgactccaggcgactcatcttctggatggactgctggagctgctgcttactacgtgggctacctgcagcctcgcaccttcctgctgaagtacaacgaaaacggaaccatcactgacgccgtcgactgcgctctggaccctctgtcagaaaccaagtgcactctgaagtccttcaccgtggagaagggcatctaccagacttcaaacttcagggtgcagcccaccgaatccatcgtcagattccctaacatcactaacctgtgccccttcggagaggtcttcaacgccacccgcttcgcttccgtgtacgcctggaacaggaagagaatctcaaactgcgtcgctgactactccgtgctgtacaactcagcctccttcagcaccttcaagtgctacggcgtgtcaccaactaagctgaacgacctgtgcttcaccaacgtctacgccgactccttcgtgatcaggggagacgaggtcagacagatcgctcctggccagactggaaagatcgccgactacaactacaagctgcccgacgacttcaccggttgcgtcatcgcttggaacagcaacaacctggactctaaagtgggtggcaactacaactacctgtaccgcctgttccgtaagtcaaacctgaagccattcgagagggacatcagcactgaaatctaccaggccggatctaccccttgcaacggtgtcgagggcttcaactgctacttccccctgcagtcctacggtttccagccaactaacggtgtgggctaccagccttacagagtggtcgtgctgagcttcgaactgctccacgctcctgctactgtgtgcggtccaaagaagtctaccaacctggtcaagaacaagtgcgtgaacttcaacttcaacggcctgaccggaactggtgtcctgaccgagagcaacaagaagttcctgcccttccagcagttcggaagggacatcgctgacaccactgacgctgtgcgcgaccctcagaccctggaaatcctggacatcactccatgctcattcggaggtgtctccgtgatcacccctggcaccaacacttctaaccaggtcgctgtgctgtaccaggacgtcaactgcaccgaggtccctgtggccatccacgctgaccagctgacccccacttggcgcgtgtactccaccggcagcaacgtgttccagactcgtgctggttgcctgatcggcgccgagcacgtgaacaacagctacgaatgcgacatccccatcggcgctggaatctgcgcctcttaccagacccagactaacagcccacagcaggctcagtctgtggcctctcagtcaatcatcgcttacaccatgtcactgggcgctgaaaactccgtggcctactctaacaactcaatcgccatccccaccaacttcactatcagcgtgaccactgagatcctgccagtcagcatgaccaagacttctgtggactgcactatgtacatctgcggagacagcaccgaatgctctaacctgctgctgcagtacggctctttctgcacccagctgaaccgtgctctgactggaatcgccgtggagcaggacaagaacactcaggaagtcttcgctcaggtgaagcaaatctacaagaccccacctatcaaggacttcggcggattcaacttctcccagatcctgcctgacccctccaagccaagcaagcgctctttcatcgaggacctgctgttcaacaaggtcactctggccgacgctggattcatcaagcagtacggagactgcctgggtgacatcgccgctcgtgacctgatctgcgctcagaagttcaacggtctgaccgtgctgcccccactgctgactgacgaaatgatcgcccagtacactagcgccctgctggctggaaccatcacttctggttggaccttcggtgctggcgccgctctgcagatccctttcgctatgcagatggcctaccgtttcaacggaatcggtgtcacccagaacgtgctgtacgagaaccagaagctgatcgctaaccagttcaactcagccatcggaaagatccaggacagcctgagctctactgcctctgctctgggcaagctgcaggacgtcgtgaaccagaacgcccaggctctgaacaccctggtcaagcagctgtcatccaacttcggtgctatcagctctgtgctgaacgacatcctgtcccgcctggacaaggtcgaggccgaagtgcagatcgaccgcctgatcactggccgtctgcagtcactgcagacctacgtgactcagcagctgatcagggccgctgaaatcagagcctccgctaacctggccgctaccaagatgagcgagtgcgtcctgggtcaatctaagcgtgtggacttctgcggcaagggataccacctgatgtcattccctcagtctgctccccacggtgtggtgttcctgcacgtcacctacgtgccagcccaggagaagaacttcaccactgcccctgctatctgccacgacggcaaggctcacttccccagggaaggtgtcttcgtgagcaacggcacccactggttcgtcactcagagaaacttctacgagccacagatcatcaccactgacaacactttcgtgtctggaaactgcgacgtggtcatcggtatcgtcaacaacaccgtgtacgaccccctgcagccagagctggactcattcaaggaggaactggacaagtacttcaagaaccacacctcccctgacgtcgacctgggcgacatctcaggaatcaacgcttccgtcgtgaacatccagaaggagatcgaccgcctgaacgaagtggccaagaacctgaacgaaagcctgatcgacctgcaggagctgggcaagtacgaacagtacatcaagtggccttggtacatctggctgggtttcatcgctggcctcatcgctatcgtgatggtgaccatcatgctgtgctgcatgacttcatgctgctcctgcctgaagggctgctgcagctgcggatcttgctgcaagttcgacgaggacgactctgaacccgtcctgaagggcgtgaagctgcactacacccaccaccaccaccaccac

SEQ ID NO: 58 - protein, 1266 aa, synthetic construct
  REGION 1..1266: note = RECOMBINANT SPIKE PROTEIN
QCVNLTTRTQLPPAYTNSFTRGVYYPDKVFRSSVLHSTQDLFLPFFSNVTWFHAIHVSGTNGTKRFDNPVLPFNDGVYFASTEKSNIIRGWIFGTTLDSKTQSLLIVNNATNVVIKVCEFQFCNDPFLGVYYHKNNKSWMESEFRVYSSANNCTFEYVSQPFLMDLEGKQGNFKNLREFVFKNIDGYFKIYSKHTPINLVRDLPQGFSALEPLVDLPIGINITRFQTLLALHRSYLTPGDSSSGWTAGAAAYYVGYLQPRTFLLKYNENGTITDAVDCALDPLSETKCTLKSFTVEKGIYQTSNFRVQPTESIVRFPNITNLCPFGEVFNATRFASVYAWNRKRISNCVADYSVLYNSASFSTFKCYGVSPTKLNDLCFTNVYADSFVIRGDEVRQIAPGQTGKIADYNYKLPDDFTGCVIAWNSNNLDSKVGGNYNYLYRLFRKSNLKPFERDISTEIYQAGSTPCNGVEGFNCYFPLQSYGFQPTNGVGYQPYRVVVLSFELLHAPATVCGPKKSTNLVKNKCVNFNFNGLTGTGVLTESNKKFLPFQQFGRDIADTTDAVRDPQTLEILDITPCSFGGVSVITPGTNTSNQVAVLYQDVNCTEVPVAIHADQLTPTWRVYSTGSNVFQTRAGCLIGAEHVNNSYECDIPIGAGICASYQTQTNSPQQAQSVASQSIIAYTMSLGAENSVAYSNNSIAIPTNFTISVTTEILPVSMTKTSVDCTMYICGDSTECSNLLLQYGSFCTQLNRALTGIAVEQDKNTQEVFAQVKQIYKTPPIKDFGGFNFSQILPDPSKPSKRSFIEDLLFNKVTLADAGFIKQYGDCLGDIAARDLICAQKFNGLTVLPPLLTDEMIAQYTSALLAGTITSGWTFGAGAALQIPFAMQMAYRFNGIGVTQNVLYENQKLIANQFNSAIGKIQDSLSSTASALGKLQDVVNQNAQALNTLVKQLSSNFGAISSVLNDILSRLDKVEAEVQIDRLITGRLQSLQTYVTQQLIRAAEIRASANLAATKMSECVLGQSKRVDFCGKGYHLMSFPQSAPHGVVFLHVTYVPAQEKNFTTAPAICHDGKAHFPREGVFVSNGTHWFVTQRNFYEPQIITTDNTFVSGNCDVVIGIVNNTVYDPLQPELDSFKEELDKYFKNHTSPDVDLGDISGINASVVNIQKEIDRLNEVAKNLNESLIDLQELGKYEQYIKWPWYIWLGFIAGLIAIVMVTIMLCCMTSCCSCLKGCCSCGSCCKFDEDDSEPVLKGVKLHYTHHHHHH

SEQ ID NO: 59 - protein, 1219 aa, synthetic construct
  REGION 1..1219: note = RECOMBINANT SPIKE PROTEIN
MFVFLVLLPLVSSQCVNLTTRTQLPPAYTNSFTRGVYYPDKVFRSSVLHSTQDLFLPFFSNVTWFHAIHVSGTNGTKRFDNPVLPFNDGVYFASTEKSNIIRGWIFGTTLDSKTQSLLIVNNATNVVIKVCEFQFCNDPFLGVYYHKNNKSWMESEFRVYSSANNCTFEYVSQPFLMDLEGKQGNFKNLREFVFKNIDGYFKIYSKHTPINLVRDLPQGFSALEPLVDLPIGINITRFQTLLALHRSYLTPGDSSSGWTAGAAAYYVGYLQPRTFLLKYNENGTITDAVDCALDPLSETKCTLKSFTVEKGIYQTSNFRVQPTESIVRFPNITNLCPFGEVFNATRFASVYAWNRKRISNCVADYSVLYNSASFSTFKCYGVSPTKLNDLCFTNVYADSFVIRGDEVRQIAPGQTGKIADYNYKLPDDFTGCVIAWNSNNLDSKVGGNYNYLYRLFRKSNLKPFERDISTEIYQAGSTPCNGVEGFNCYFPLQSYGFQPTNGVGYQPYRVVVLSFELLHAPATVCGPKKSTNLVKNKCVNFNFNGLTGTGVLTESNKKFLPFQQFGRDIADTTDAVRDPQTLEILDITPCSFGGVSVITPGTNTSNQVAVLYQDVNCTEVPVAIHADQLTPTWRVYSTGSNVFQTRAGCLIGAEHVNNSYECDIPIGAGICASYQTQTNSPQQAQSVASQSIIAYTMSLGAENSVAYSNNSIAIPTNFTISVTTEILPVSMTKTSVDCTMYICGDSTECSNLLLQYGSFCTQLNRALTGIAVEQDKNTQEVFAQVKQIYKTPPIKDFGGFNFSQILPDPSKPSKRSFIEDLLFNKVTLADAGFIKQYGDCLGDIAARDLICAQKFNGLTVLPPLLTDEMIAQYTSALLAGTITSGWTFGAGAALQIPFAMQMAYRFNGIGVTQNVLYENQKLIANQFNSAIGKIQDSLSSTASALGKLQDVVNQNAQALNTLVKQLSSNFGAISSVLNDILSRLDKVEAEVQIDRLITGRLQSLQTYVTQQLIRAAEIRASANLAATKMSECVLGQSKRVDFCGKGYHLMSFPQSAPHGVVFLHVTYVPAQEKNFTTAPAICHDGKAHFPREGVFVSNGTHWFVTQRNFYEPQIITTDNTFVSGNCDVVIGIVNNTVYDPLQPELDSFKEELDKYFKNHTSPDVDLGDISGINASVVNIQKEIDRLNEVAKNLNESLIDLQELGKYEQYIKWPHHHHHH

SEQ ID NO: 60 - DNA, 3657 bp, synthetic construct
  misc_feature 1..3657: note = RECOMBINANT SPIKE PROTEIN
  source 1..3657: mol_type = other DNA
atgttcgtcttcctggtgctgctgcccctggtgtccagccagtgcgtgaacctgaccactaggactcagctgcctcccgcttacaccaactcattcactcgcggtgtgtactaccctgacaaggtcttccgttcttcagtgctgcactcaactcaggacctgttcctgcccttcttctccaacgtcacctggttccacgccatccacgtgtccggcaccaacggcactaagcgcttcgacaacccagtgctgcctttcaacgacggtgtctacttcgcttcaaccgagaagtccaacatcatccgtggatggatcttcggcaccactctggacagcaagactcagtctctgctgatcgtcaacaacgccaccaacgtggtcatcaaggtctgcgaattccagttctgcaacgacccattcctgggcgtctactaccacaagaacaacaagtcatggatggagtccgaattccgcgtctactccagcgctaacaactgcactttcgagtacgtgtcccagcctttcctgatggacctggaaggaaagcagggtaacttcaagaacctgagggagttcgtgttcaagaacatcgacggatacttcaagatttacagcaagcacaccccaatcaacctggtgcgcgacctgcctcagggtttctctgctctggagccactggtggacctgcctatcggcatcaacatcacccgcttccagactctgctggctctgcaccgttcctacctgactccaggcgactcatcttctggatggactgctggagctgctgcttactacgtgggctacctgcagcctcgcaccttcctgctgaagtacaacgaaaacggaaccatcactgacgccgtcgactgcgctctggaccctctgtcagaaaccaagtgcactctgaagtccttcaccgtggagaagggcatctaccagacttcaaacttcagggtgcagcccaccgaatccatcgtcagattccctaacatcactaacctgtgccccttcggagaggtcttcaacgccacccgcttcgcttccgtgtacgcctggaacaggaagagaatctcaaactgcgtcgctgactactccgtgctgtacaactcagcctccttcagcaccttcaagtgctacggcgtgtcaccaactaagctgaacgacctgtgcttcaccaacgtctacgccgactccttcgtgatcaggggagacgaggtcagacagatcgctcctggccagactggaaagatcgccgactacaactacaagctgcccgacgacttcaccggttgcgtcatcgcttggaacagcaacaacctggactctaaagtgggtggcaactacaactacctgtaccgcctgttccgtaagtcaaacctgaagccattcgagagggacatcagcactgaaatctaccaggccggatctaccccttgcaacggtgtcgagggcttcaactgctacttccccctgcagtcctacggtttccagccaactaacggtgtgggctaccagccttacagagtggtcgtgctgagcttcgaactgctccacgctcctgctactgtgtgcggtccaaagaagtctaccaacctggtcaagaacaagtgcgtgaacttcaacttcaacggcctgaccggaactggtgtcctgaccgagagcaacaagaagttcctgcccttccagcagttcggaagggacatcgctgacaccactgacgctgtgcgcgaccctcagaccctggaaatcctggacatcactccatgctcattcggaggtgtctccgtgatcacccctggcaccaacacttctaaccaggtcgctgtgctgtaccaggacgtcaactgcaccgaggtccctgtggccatccacgctgaccagctgacccccacttggcgcgtgtactccaccggcagcaacgtgttccagactcgtgctggttgcctgatcggcgccgagcacgtgaacaacagctacgaatgcgacatccccatcggcgctggaatctgcgcctcttaccagacccagactaacagcccacagcaggctcagtctgtggcctctcagtcaatcatcgcttacaccatgtcactgggcgctgaaaactccgtggcctactctaacaactcaatcgccatccccaccaacttcactatcagcgtgaccactgagatcctgccagtcagcatgaccaagacttctgtggactgcactatgtacatctgcggagacagcaccgaatgctctaacctgctgctgcagtacggctctttctgcacccagctgaaccgtgctctgactggaatcgccgtggagcaggacaagaacactcaggaagtcttcgctcaggtgaagcaaatctacaagaccccacctatcaaggacttcggcggattcaacttctcccagatcctgcctgacccctccaagccaagcaagcgctctttcatcgaggacctgctgttcaacaaggtcactctggccgacgctggattcatcaagcagtacggagactgcctgggtgacatcgccgctcgtgacctgatctgcgctcagaagttcaacggtctgaccgtgctgcccccactgctgactgacgaaatgatcgcccagtacactagcgccctgctggctggaaccatcacttctggttggaccttcggtgctggcgccgctctgcagatccctttcgctatgcagatggcctaccgtttcaacggaatcggtgtcacccagaacgtgctgtacgagaaccagaagctgatcgctaaccagttcaactcagccatcggaaagatccaggacagcctgagctctactgcctctgctctgggcaagctgcaggacgtcgtgaaccagaacgcccaggctctgaacaccctggtcaagcagctgtcatccaacttcggtgctatcagctctgtgctgaacgacatcctgtcccgcctggacaaggtcgaggccgaagtgcagatcgaccgcctgatcactggccgtctgcagtcactgcagacctacgtgactcagcagctgatcagggccgctgaaatcagagcctccgctaacctggccgctaccaagatgagcgagtgcgtcctgggtcaatctaagcgtgtggacttctgcggcaagggataccacctgatgtcattccctcagtctgctccccacggtgtggtgttcctgcacgtcacctacgtgccagcccaggagaagaacttcaccactgcccctgctatctgccacgacggcaaggctcacttccccagggaaggtgtcttcgtgagcaacggcacccactggttcgtcactcagagaaacttctacgagccacagatcatcaccactgacaacactttcgtgtctggaaactgcgacgtggtcatcggtatcgtcaacaacaccgtgtacgaccccctgcagccagagctggactcattcaaggaggaactggacaagtacttcaagaaccacacctcccctgacgtcgacctgggcgacatctcaggaatcaacgcttccgtcgtgaacatccagaaggagatcgaccgcctgaacgaagtggccaagaacctgaacgaaagcctgatcgacctgcaggagctgggcaagtacgaacagtacatcaagtggcctcaccaccaccaccaccac

SEQ ID NO: 61 - protein, 1205 aa, synthetic construct
  REGION 1..1205: note = RECOMBINANT SPIKE PROTEIN
CVNLTTRTQLPPAYTNSFTRGVYYPDKVFRSSVLHSTQDLFLPFFSNVTWFHAIHVSGTNGTKRFDNPVLPFNDGVYFASTEKSNIIRGWIFGTTLDSKTQSLLIVNNATNVVIKVCEFQFCNDPFLGVYYHKNNKSWMESEFRVYSSANNCTFEYVSQPFLMDLEGKQGNFKNLREFVFKNIDGYFKIYSKHTPINLVRDLPQGFSALEPLVDLPIGINITRFQTLLALHRSYLTPGDSSSGWTAGAAAYYVGYLQPRTFLLKYNENGTITDAVDCALDPLSETKCTLKSFTVEKGIYQTSNFRVQPTESIVRFPNITNLCPFGEVFNATRFASVYAWNRKRISNCVADYSVLYNSASFSTFKCYGVSPTKLNDLCFTNVYADSFVIRGDEVRQIAPGQTGKIADYNYKLPDDFTGCVIAWNSNNLDSKVGGNYNYLYRLFRKSNLKPFERDISTEIYQAGSTPCNGVEGFNCYFPLQSYGFQPTNGVGYQPYRVVVLSFELLHAPATVCGPKKSTNLVKNKCVNFNFNGLTGTGVLTESNKKFLPFQQFGRDIADTTDAVRDPQTLEILDITPCSFGGVSVITPGTNTSNQVAVLYQDVNCTEVPVAIHADQLTPTWRVYSTGSNVFQTRAGCLIGAEHVNNSYECDIPIGAGICASYQTQTNSPQQAQSVASQSIIAYTMSLGAENSVAYSNNSIAIPTNFTISVTTEILPVSMTKTSVDCTMYICGDSTECSNLLLQYGSFCTQLNRALTGIAVEQDKNTQEVFAQVKQIYKTPPIKDFGGFNFSQILPDPSKPSKRSFIEDLLFNKVTLADAGFIKQYGDCLGDIAARDLICAQKFNGLTVLPPLLTDEMIAQYTSALLAGTITSGWTFGAGAALQIPFAMQMAYRFNGIGVTQNVLYENQKLIANQFNSAIGKIQDSLSSTASALGKLQDVVNQNAQALNTLVKQLSSNFGAISSVLNDILSRLDKVEAEVQIDRLITGRLQSLQTYVTQQLIRAAEIRASANLAATKMSECVLGQSKRVDFCGKGYHLMSFPQSAPHGVVFLHVTYVPAQEKNFTTAPAICHDGKAHFPREGVFVSNGTHWFVTQRNFYEPQIITTDNTFVSGNCDVVIGIVNNTVYDPLQPELDSFKEELDKYFKNHTSPDVDLGDISGINASVVNIQKEIDRLNEVAKNLNESLIDLQELGKYEQYIKWPHHHHHH

SEQ ID NO: 62 - protein, 1263 aa, synthetic construct
  REGION 1..1263: note = RECOMBINANT SPIKE PROTEIN
MFVFLVLLPLVSSQCVNLTTRTQLPPAYTNSFTRGVYYPDKVFRSSVLHSTQDLFLPFFSNVTWFHAIHVSGTNGTKRFDNPVLPFNDGVYFASTEKSNIIRGWIFGTTLDSKTQSLLIVNNATNVVIKVCEFQFCNDPFLGVYYHKNNKSWMESEFRVYSSANNCTFEYVSQPFLMDLEGKQGNFKNLREFVFKNIDGYFKIYSKHTPINLVRDLPQGFSALEPLVDLPIGINITRFQTLLALHRSYLTPGDSSSGWTAGAAAYYVGYLQPRTFLLKYNENGTITDAVDCALDPLSETKCTLKSFTVEKGIYQTSNFRVQPTESIVRFPNITNLCPFGEVFNATRFASVYAWNRKRISNCVADYSVLYNSASFSTFKCYGVSPTKLNDLCFTNVYADSFVIRGDEVRQIAPGQTGKIADYNYKLPDDFTGCVIAWNSNNLDSKVGGNYNYLYRLFRKSNLKPFERDISTEIYQAGSTPCNGVEGFNCYFPLQSYGFQPTNGVGYQPYRVVVLSFELLHAPATVCGPKKSTNLVKNKCVNFNFNGLTGTGVLTESNKKFLPFQQFGRDIADTTDAVRDPQTLEILDITPCSFGGVSVITPGTNTSNQVAVLYQDVNCTEVPVAIHADQLTPTWRVYSTGSNVFQTRAGCLIGAEHVNNSYECDIPIGAGICASYQTQTNSPQQAQSVALGAENSVAYSNNSIAIPTNFTISVTTEILPVSMTKTSVDCTMYICGDSTECSNLLLQYGSFCTQLNRALTGIAVEQDKNTQEVFAQVKQIYKTPPIKDFGGFNFSQILPDPSKPSKRSFIEDLLFNKVTLADAGFIKQYGDCLGDIAARDLICAQKFNGLTVLPPLLTDEMIAQYTSALLAGTITSGWTFGAGAALQIPFAMQMAYRFNGIGVTQNVLYENQKLIANQFNSAIGKIQDSLSSTASALGKLQDVVNQNAQALNTLVKQLSSNFGAISSVLNDILSRLDKVEAEVQIDRLITGRLQSLQTYVTQQLIRAAEIRASANLAATKMSECVLGQSKRVDFCGKGYHLMSFPQSAPHGVVFLHVTYVPAQEKNFTTAPAICHDGKAHFPREGVFVSNGTHWFVTQRNFYEPQIITTDNTFVSGNCDVVIGIVNNTVYDPLQPELDSFKEELDKYFKNHTSPDVDLGDISGINASVVNIQKEIDRLNEVAKNLNESLIDLQELGKYEQYIKWPWYIWLGFIAGLIAIVMVTIMLCCMTSCCSCLKGCCSCGSCCKFDEDDSEPVLKGVKLHYT

SEQ ID NO: 63 - protein, 1250 aa, synthetic construct
  REGION 1..1250: note = RECOMBINANT SPIKE PROTEIN
QCVNLTTRTQLPPAYTNSFTRGVYYPDKVFRSSVLHSTQDLFLPFFSNVTWFHAIHVSGTNGTKRFDNPVLPFNDGVYFASTEKSNIIRGWIFGTTLDSKTQSLLIVNNATNVVIKVCEFQFCNDPFLGVYYHKNNKSWMESEFRVYSSANNCTFEYVSQPFLMDLEGKQGNFKNLREFVFKNIDGYFKIYSKHTPINLVRDLPQGFSALEPLVDLPIGINITRFQTLLALHRSYLTPGDSSSGWTAGAAAYYVGYLQPRTFLLKYNENGTITDAVDCALDPLSETKCTLKSFTVEKGIYQTSNFRVQPTESIVRFPNITNLCPFGEVFNATRFASVYAWNRKRISNCVADYSVLYNSASFSTFKCYGVSPTKLNDLCFTNVYADSFVIRGDEVRQIAPGQTGKIADYNYKLPDDFTGCVIAWNSNNLDSKVGGNYNYLYRLFRKSNLKPFERDISTEIYQAGSTPCNGVEGFNCYFPLQSYGFQPTNGVGYQPYRVVVLSFELLHAPATVCGPKKSTNLVKNKCVNFNFNGLTGTGVLTESNKKFLPFQQFGRDIADTTDAVRDPQTLEILDITPCSFGGVSVITPGTNTSNQVAVLYQDVNCTEVPVAIHADQLTPTWRVYSTGSNVFQTRAGCLIGAEHVNNSYECDIPIGAGICASYQTQTNSPQQAQSVALGAENSVAYSNNSIAIPTNFTISVTTEILPVSMTKTSVDCTMYICGDSTECSNLLLQYGSFCTQLNRALTGIAVEQDKNTQEVFAQVKQIYKTPPIKDFGGFNFSQILPDPSKPSKRSFIEDLLFNKVTLADAGFIKQYGDCLGDIAARDLICAQKFNGLTVLPPLLTDEMIAQYTSALLAGTITSGWTFGAGAALQIPFAMQMAYRFNGIGVTQNVLYENQKLIANQFNSAIGKIQDSLSSTASALGKLQDVVNQNAQALNTLVKQLSSNFGAISSVLNDILSRLDKVEAEVQIDRLITGRLQSLQTYVTQQLIRAAEIRASANLAATKMSECVLGQSKRVDFCGKGYHLMSFPQSAPHGVVFLHVTYVPAQEKNFTTAPAICHDGKAHFPREGVFVSNGTHWFVTQRNFYEPQIITTDNTFVSGNCDVVIGIVNNTVYDPLQPELDSFKEELDKYFKNHTSPDVDLGDISGINASVVNIQKEIDRLNEVAKNLNESLIDLQELGKYEQYIKWPWYIWLGFIAGLIAIVMVTIMLCCMTSCCSCLKGCCSCGSCCKFDEDDSEPVLKGVKLHYT

SEQ ID NO: 64 - protein, 1263 aa, synthetic construct
  REGION 1..1263: note = RECOMBINANT SPIKE PROTEIN
MFVFLVLLPLVSSQCVNLTTRTQLPPAYTNSFTRGVYYPDKVFRSSVLHSTQDLFLPFFSNVTWFHAIHVSGTNGTKRFDNPVLPFNDGVYFASTEKSNIIRGWIFGTTLDSKTQSLLIVNNATNVVIKVCEFQFCNDPFLGVYYHKNNKSWMESEFRVYSSANNCTFEYVSQPFLMDLEGKQGNFKNLREFVFKNIDGYFKIYSKHTPINLVRDLPQGFSALEPLVDLPIGINITRFQTLLALHRSYLTPGDSSSGWTAGAAAYYVGYLQPRTFLLKYNENGTITDAVDCALDPLSETKCTLKSFTVEKGIYQTSNFRVQPTESIVRFPNITNLCPFGEVFNATRFASVYAWNRKRISNCVADYSVLYNSASFSTFKCYGVSPTKLNDLCFTNVYADSFVIRGDEVRQIAPGQTGKIADYNYKLPDDFTGCVIAWNSNNLDSKVGGNYNYLYRLFRKSNLKPFERDISTEIYQAGSTPCNGVEGFNCYFPLQSYGFQPTNGVGYQPYRVVVLSFELLHAPATVCGPKKSTNLVKNKCVNFNFNGLTGTGVLTESNKKFLPFQQFGRDIADTTDAVRDPQTLEILDITPCSFGGVSVITPGTNTSNQVAVLYQDVNCTEVPVAIHADQLTPTWRVYSTGSNVFQTRAGCLIGAEHVNNSYECDIPIGAGICASYQTQTNSPQQAQSVASQSIIAYTMSLGAENSVAYSNNSIAIEILPVSMTKTSVDCTMYICGDSTECSNLLLQYGSFCTQLNRALTGIAVEQDKNTQEVFAQVKQIYKTPPIKDFGGFNFSQILPDPSKPSKRSFIEDLLFNKVTLADAGFIKQYGDCLGDIAARDLICAQKFNGLTVLPPLLTDEMIAQYTSALLAGTITSGWTFGAGAALQIPFAMQMAYRFNGIGVTQNVLYENQKLIANQFNSAIGKIQDSLSSTASALGKLQDVVNQNAQALNTLVKQLSSNFGAISSVLNDILSRLDKVEAEVQIDRLITGRLQSLQTYVTQQLIRAAEIRASANLAATKMSECVLGQSKRVDFCGKGYHLMSFPQSAPHGVVFLHVTYVPAQEKNFTTAPAICHDGKAHFPREGVFVSNGTHWFVTQRNFYEPQIITTDNTFVSGNCDVVIGIVNNTVYDPLQPELDSFKEELDKYFKNHTSPDVDLGDISGINASVVNIQKEIDRLNEVAKNLNESLIDLQELGKYEQYIKWPWYIWLGFIAGLIAIVMVTIMLCCMTSCCSCLKGCCSCGSCCKFDEDDSEPVLKGVKLHYT

SEQ ID NO: 65 - protein, 1250 aa, synthetic construct
  REGION 1..1250: note = RECOMBINANT SPIKE PROTEIN
QCVNLTTRTQLPPAYTNSFTRGVYYPDKVFRSSVLHSTQDLFLPFFSNVTWFHAIHVSGTNGTKRFDNPVLPFNDGVYFASTEKSNIIRGWIFGTTLDSKTQSLLIVNNATNVVIKVCEFQFCNDPFLGVYYHKNNKSWMESEFRVYSSANNCTFEYVSQPFLMDLEGKQGNFKNLREFVFKNIDGYFKIYSKHTPINLVRDLPQGFSALEPLVDLPIGINITRFQTLLALHRSYLTPGDSSSGWTAGAAAYYVGYLQPRTFLLKYNENGTITDAVDCALDPLSETKCTLKSFTVEKGIYQTSNFRVQPTESIVRFPNITNLCPFGEVFNATRFASVYAWNRKRISNCVADYSVLYNSASFSTFKCYGVSPTKLNDLCFTNVYADSFVIRGDEVRQIAPGQTGKIADYNYKLPDDFTGCVIAWNSNNLDSKVGGNYNYLYRLFRKSNLKPFERDISTEIYQAGSTPCNGVEGFNCYFPLQSYGFQPTNGVGYQPYRVVVLSFELLHAPATVCGPKKSTNLVKNKCVNFNFNGLTGTGVLTESNKKFLPFQQFGRDIADTTDAVRDPQTLEILDITPCSFGGVSVITPGTNTSNQVAVLYQDVNCTEVPVAIHADQLTPTWRVYSTGSNVFQTRAGCLIGAEHVNNSYECDIPIGAGICASYQTQTNSPQQAQSVASQSIIAYTMSLGAENSVAYSNNSIAIEILPVSMTKTSVDCTMYICGDSTECSNLLLQYGSFCTQLNRALTGIAVEQDKNTQEVFAQVKQIYKTPPIKDFGGFNFSQILPDPSKPSKRSFIEDLLFNKVTLADAGFIKQYGDCLGDIAARDLICAQKFNGLTVLPPLLTDEMIAQYTSALLAGTITSGWTFGAGAALQIPFAMQMAYRFNGIGVTQNVLYENQKLIANQFNSAIGKIQDSLSSTASALGKLQDVVNQNAQALNTLVKQLSSNFGAISSVLNDILSRLDKVEAEVQIDRLITGRLQSLQTYVTQQLIRAAEIRASANLAATKMSECVLGQSKRVDFCGKGYHLMSFPQSAPHGVVFLHVTYVPAQEKNFTTAPAICHDGKAHFPREGVFVSNGTHWFVTQRNFYEPQIITTDNTFVSGNCDVVIGIVNNTVYDPLQPELDSFKEELDKYFKNHTSPDVDLGDISGINASVVNIQKEIDRLNEVAKNLNESLIDLQELGKYEQYIKWPWYIWLGFIAGLIAIVMVTIMLCCMTSCCSCLKGCCSCGSCCKFDEDDSEPVLKGVKLHYT

SEQ ID NO: 66 - protein, 1263 aa, synthetic construct
  REGION 1..1263: note = RECOMBINANT SPIKE PROTEIN
MFVFLVLLPLVSSQCVNLTTRTQLPPAYTNSFTRGVYYPDKVFRSSVLHSTQDLFLPFFSNVTWFHAIHVSGTNGTKRFDNPVLPFNDGVYFASTEKSNIIRGWIFGTTLDSKTQSLLIVNNATNVVIKVCEFQFCNDPFLGVYYHKNNKSWMESEFRVYSSANNCTFEYVSQPFLMDLEGKQGNFKNLREFVFKNIDGYFKIYSKHTPINLVRDLPQGFSALEPLVDLPIGINITRFQTLLALHRSYLTPGDSSSGWTAGAAAYYVGYLQPRTFLLKYNENGTITDAVDCALDPLSETKCTLKSFTVEKGIYQTSNFRVQPTESIVRFPNITNLCPFGEVFNATRFASVYAWNRKRISNCVADYSVLYNSASFSTFKCYGVSPTKLNDLCFTNVYADSFVIRGDEVRQIAPGQTGKIADYNYKLPDDFTGCVIAWNSNNLDSKVGGNYNYLYRLFRKSNLKPFERDISTEIYQAGSTPCNGVEGFNCYFPLQSYGFQPTNGVGYQPYRVVVLSFELLHAPATVCGPKKSTNLVKNKCVNFNFNGLTGTGVLTESNKKFLPFQQFGRDIADTTDAVRDPQTLEILDITPCSFGGVSVITPGTNTSNQVAVLYQDVNCTEVPVAIHADQLTPTWRVYSTGSNVFQTRAGCLIGAEHVNNSYECDIPIGAGICASYQTQTNSPQQAQSVASQSIIAYTMSLGAENSVAYSNNSIAIPTNFTISVTTEILPVSMTKTSVDCTMYICGDSTECSNLLLQYGSFCTQLNRALTGIAVEQDKNTQEVFAQVKQIYKTPPIKDFGGFNFSQILPDPSKPSKRSFIADAGFIKQYGDCLGDIAARDLICAQKFNGLTVLPPLLTDEMIAQYTSALLAGTITSGWTFGAGAALQIPFAMQMAYRFNGIGVTQNVLYENQKLIANQFNSAIGKIQDSLSSTASALGKLQDVVNQNAQALNTLVKQLSSNFGAISSVLNDILSRLDKVEAEVQIDRLITGRLQSLQTYVTQQLIRAAEIRASANLAATKMSECVLGQSKRVDFCGKGYHLMSFPQSAPHGVVFLHVTYVPAQEKNFTTAPAICHDGKAHFPREGVFVSNGTHWFVTQRNFYEPQIITTDNTFVSGNCDVVIGIVNNTVYDPLQPELDSFKEELDKYFKNHTSPDVDLGDISGINASVVNIQKEIDRLNEVAKNLNESLIDLQELGKYEQYIKWPWYIWLGFIAGLIAIVMVTIMLCCMTSCCSCLKGCCSCGSCCKFDEDDSEPVLKGVKLHYT

SEQ ID NO: 67 - protein, 1250 aa, synthetic construct
  REGION 1..1250: note = RECOMBINANT SPIKE PROTEIN
QCVNLTTRTQLPPAYTNSFTRGVYYPDKVFRSSVLHSTQDLFLPFFSNVTWFHAIHVSGTNGTKRFDNPVLPFNDGVYFASTEKSNIIRGWIFGTTLDSKTQSLLIVNNATNVVIKVCEFQFCNDPFLGVYYHKNNKSWMESEFRVYSSANNCTFEYVSQPFLMDLEGKQGNFKNLREFVFKNIDGYFKIYSKHTPINLVRDLPQGFSALEPLVDLPIGINITRFQTLLALHRSYLTPGDSSSGWTAGAAAYYVGYLQPRTFLLKYNENGTITDAVDCALDPLSETKCTLKSFTVEKGIYQTSNFRVQPTESIVRFPNITNLCPFGEVFNATRFASVYAWNRKRISNCVADYSVLYNSASFSTFKCYGVSPTKLNDLCFTNVYADSFVIRGDEVRQIAPGQTGKIADYNYKLPDDFTGCVIAWNSNNLDSKVGGNYNYLYRLFRKSNLKPFERDISTEIYQAGSTPCNGVEGFNCYFPLQSYGFQPTNGVGYQPYRVVVLSFELLHAPATVCGPKKSTNLVKNKCVNFNFNGLTGTGVLTESNKKFLPFQQFGRDIADTTDAVRDPQTLEILDITPCSFGGVSVITPGTNTSNQVAVLYQDVNCTEVPVAIHADQLTPTWRVYSTGSNVFQTRAGCLIGAEHVNNSYECDIPIGAGICASYQTQTNSPQQAQSVASQSIIAYTMSLGAENSVAYSNNSIAIPTNFTISVTTEILPVSMTKTSVDCTMYICGDSTECSNLLLQYGSFCTQLNRALTGIAVEQDKNTQEVFAQVKQIYKTPPIKDFGGFNFSQILPDPSKPSKRSFIADAGFIKQYGDCLGDIAARDLICAQKFNGLTVLPPLLTDEMIAQYTSALLAGTITSGWTFGAGAALQIPFAMQMAYRFNGIGVTQNVLYENQKLIANQFNSAIGKIQDSLSSTASALGKLQDVVNQNAQALNTLVKQLSSNFGAISSVLNDILSRLDKVEAEVQIDRLITGRLQSLQTYVTQQLIRAAEIRASANLAATKMSECVLGQSKRVDFCGKGYHLMSFPQSAPHGVVFLHVTYVPAQEKNFTTAPAICHDGKAHFPREGVFVSNGTHWFVTQRNFYEPQIITTDNTFVSGNCDVVIGIVNNTVYDPLQPELDSFKEELDKYFKNHTSPDVDLGDISGINASVVNIQKEIDRLNEVAKNLNESLIDLQELGKYEQYIKWPWYIWLGFIAGLIAIVMVTIMLCCMTSCCSCLKGCCSCGSCCKFDEDDSEPVLKGVKLHYT

SEQ ID NO: 68 - protein, 31 aa, synthetic construct
  REGION 1..31: note = Foldon
SAIGGYIPEAPRDGQAYVRKDGEWVLLSTFL

SEQ ID NO: 69 - protein, 202 aa, Severe acute respiratory syndrome-related coronavirus
RFPNITNLCPFGEVFNATRFASVYAWNRKRISNCVADYSVLYNSASFSTFKCYGVSPTKLNDLCFTNVYADSFVIRGDEVRQIAPGQTGKIADYNYKLPDDFTGCVIAWNSNNLDSKVGGNYNYLYRLFRKSNLKPFERDISTEIYQAGSTPCNGVEGFNCYFPLQSYGFQPTNGVGYQPYRVVVLSFELLHAPATVCGPKK

SEQ ID NO: 70 - protein, 201 aa, Severe acute respiratory syndrome-related coronavirus
RFPNITNLCPFGEVFNATKFPSVYAWERKKISNCVADYSVLYNSTFFSTFKCYGVSATKLNDLCFSNVYADSFVVKGDDVRQIAPGQTGVIADYNYKLPDDFMGCVLAWNTRNIDATSTGNYNYKYRYLRHGKLRPFERDISNVPFSPDGKPCTPPALNCYWPLNDYGFYTTTGIGYQPYRVVVLSFELLNAPATVCGPKL

SEQ ID NO: 71 - protein, 239 aa, Middle East respiratory syndrome-related coronavirus
FEAKPSGSVVAEGVECDFSPLLSGTPPQVYNFKRLVFTNCNYNLTKLLSLFSVNDFTCSQISPAAIASNCYSSLILDYFSYPLSMKSDLSVSSAGPISQFNYKQSFSNPTCLILATVPHNLTTITKPLKYSYINKCSRLLSDDRTEVPQLVNANQYSPCVSIVPSTVWEDGDYYRKQLSPLEGGGWLVASGSTVAMTEQLQMGFGITVQYGTDTNSVCPKLEFANDTKIASQLGNCVEY

SEQ ID NO: 72 - protein, 544 aa, synthetic construct
  REGION 1..544: note = RECOMBINANT SPIKE PROTEIN
MFVFLVLLPLVSSRFPNITNLCPFGEVFNATRFASVYAWNRKRISNCVADYSVLYNSASFSTFKCYGVSPTKLNDLCFTNVYADSFVIRGDEVRQIAPGQTGKIADYNYKLPDDFTGCVIAWNSNNLDSKVGGNYNYLYRLFRKSNLKPFERDISTEIYQAGSTPCNGVEGFNCYFPLQSYGFQPTNGVGYQPYRVVVLSFELLHAPATVCGPKKSTNLVKNKCVNFNFNGLTGTGVLTESNKKFLPFQQFGRDIADTTDAVRDPQTLEILDITPCSFGGVSVITPGTNTSNQVAVLYQDVNCTERFPNITNLCPFGEVFNATRFASVYAWNRKRISNCVADYSVLYNSASFSTFKCYGVSPTKLNDLCFTNVYADSFVIRGDEVRQIAPGQTGKIADYNYKLPDDFTGCVIAWNSNNLDSKVGGNYNYLYRLFRKSNLKPFERDISTEIYQAGSTPCNGVEGFNCYFPLQSYGFQPTNGVGYQPYRVVVLSFELLHAPATVCGPKKSAIGGYIPEAPRDGQAYVRKDGEWVLLSTFLHHHHHH

SEQ ID NO: 73 - protein, 531 aa, synthetic construct
  REGION 1..531: note = RECOMBINANT SPIKE PROTEIN
RFPNITNLCPFGEVFNATRFASVYAWNRKRISNCVADYSVLYNSASFSTFKCYGVSPTKLNDLCFTNVYADSFVIRGDEVRQIAPGQTGKIADYNYKLPDDFTGCVIAWNSNNLDSKVGGNYNYLYRLFRKSNLKPFERDISTEIYQAGSTPCNGVEGFNCYFPLQSYGFQPTNGVGYQPYRVVVLSFELLHAPATVCGPKKSTNLVKNKCVNFNFNGLTGTGVLTESNKKFLPFQQFGRDIADTTDAVRDPQTLEILDITPCSFGGVSVITPGTNTSNQVAVLYQDVNCTERFPNITNLCPFGEVFNATRFASVYAWNRKRISNCVADYSVLYNSASFSTFKCYGVSPTKLNDLCFTNVYADSFVIRGDEVRQIAPGQTGKIADYNYKLPDDFTGCVIAWNSNNLDSKVGGNYNYLYRLFRKSNLKPFERDISTEIYQAGSTPCNGVEGFNCYFPLQSYGFQPTNGVGYQPYRVVVLSFELLHAPATVCGPKKSAIGGYIPEAPRDGQAYVRKDGEWVLLSTFLHHHHHH

SEQ ID NO: 74 - protein, 544 aa, synthetic construct; identical to SEQ ID NO: 72
  REGION 1..544: note = RECOMBINANT SPIKE PROTEIN

SEQ ID NO: 75 - protein, 531 aa, synthetic construct; identical to SEQ ID NO: 73
  REGION 1..531: note = RECOMBINANT SPIKE PROTEIN

SEQ ID NO: 76 - protein, 470 aa, synthetic construct
  REGION 1..470: note = RECOMBINANT SPIKE PROTEIN
MFVFLVLLPLVSSRFPNITNLCPFGEVFNATRFASVYAWNRKRISNCVADYSVLYNSASFSTFKCYGVSPTKLNDLCFTNVYADSFVIRGDEVRQIAPGQTGKIADYNYKLPDDFTGCVIAWNSNNLDSKVGGNYNYLYRLFRKSNLKPFERDISTEIYQAGSTPCNGVEGFNCYFPLQSYGFQPTNGVGYQPYRVVVLSFELLHAPATVCGPKKSGGGSGGGSGGGSGGGSRFPNITNLCPFGEVFNATKFPSVYAWERKKISNCVADYSVLYNSTFFSTFKCYGVSATKLNDLCFSNVYADSFVVKGDDVRQIAPGQTGVIADYNYKLPDDFMGCVLAWNTRNIDATSTGNYNYKYRYLRHGKLRPFERDISNVPFSPDGKPCTPPALNCYWPLNDYGFYTTTGIGYQPYRVVVLSFELLNAPATVCGPKLSAIGGYIPEAPRDGQAYVRKDGEWVLLSTFLHHHHHH

SEQ ID NO: 77 - protein, 464 aa, synthetic construct
  REGION 1..464: note = RECOMBINANT SPIKE PROTEIN
MFVFLVLLPLVSSRFPNITNLCPFGEVFNATRFASVYAWNRKRISNCVADYSVLYNSASFSTFKCYGVSPTKLNDLCFTNVYADSFVIRGDEVRQIAPGQTGKIADYNYKLPDDFTGCVIAWNSNNLDSKVGGNYNYLYRLFRKSNLKPFERDISTEIYQAGSTPCNGVEGFNCYFPLQSYGFQPTNGVGYQPYRVVVLSFELLHAPATVCGPKKSGGGSGGGSGGGSGGGSRFPNITNLCPFGEVFNATKFPSVYAWERKKISNCVADYSVLYNSTFFSTFKCYGVSATKLNDLCFSNVYADSFVVKGDDVRQIAPGQTGVIADYNYKLPDDFMGCVLAWNTRNIDATSTGNYNYKYRYLRHGKLRPFERDISNVPFSPDGKPCTPPALNCYWPLNDYGFYTTTGIGYQPYRVVVLSFELLNAPATVCGPKLSAIGGYIPEAPRDGQAYVRKDGEWVLLSTFL

SEQ ID NO: 78 - protein, 457 aa, synthetic construct
  REGION 1..457: note = RECOMBINANT SPIKE PROTEIN
RFPNITNLCPFGEVFNATRFASVYAWNRKRISNCVADYSVLYNSASFSTFKCYGVSPTKLNDLCFTNVYADSFVIRGDEVRQIAPGQTGKIADYNYKLPDDFTGCVIAWNSNNLDSKVGGNYNYLYRLFRKSNLKPFERDISTEIYQAGSTPCNGVEGFNCYFPLQSYGFQPTNGVGYQPYRVVVLSFELLHAPATVCGPKKSGGGSGGGSGGGSGGGSRFPNITNLCPFGEVFNATKFPSVYAWERKKISNCVADYSVLYNSTFFSTFKCYGVSATKLNDLCFSNVYADSFVVKGDDVRQIAPGQTGVIADYNYKLPDDFMGCVLAWNTRNIDATSTGNYNYKYRYLRHGKLRPFERDISNVPFSPDGKPCTPPALNCYWPLNDYGFYTTTGIGYQPYRVVVLSFELLNAPATVCGPKLSAIGGYIPEAPRDGQAYVRKDGEWVLLSTFLHHHHHH

SEQ ID NO: 79 - protein, 451 aa, synthetic construct
  REGION 1..451: note = RECOMBINANT SPIKE PROTEIN
RFPNITNLCPFGEVFNATRFASVYAWNRKRISNCVADYSVLYNSASFSTFKCYGVSPTKLNDLCFTNVYADSFVIRGDEVRQIAPGQTGKIADYNYKLPDDFTGCVIAWNSNNLDSKVGGNYNYLYRLFRKSNLKPFERDISTEIYQAGSTPCNGVEGFNCYFPLQSYGFQPTNGVGYQPYRVVVLSFELLHAPATVCGPKKSGGGSGGGSGGGSGGGSRFPNITNLCPFGEVFNATKFPSVYAWERKKISNCVADYSVLYNSTFFSTFKCYGVSATKLNDLCFSNVYADSFVVKGDDVRQIAPGQTGVIADYNYKLPDDFMGCVLAWNTRNIDATSTGNYNYKYRYLRHGKLRPFERDISNVPFSPDGKPCTPPALNCYWPLNDYGFYTTTGIGYQPYRVVVLSFELLNAPATVCGPKLSAIGGYIPEAPRDGQAYVRKDGEWVLLSTFL

SEQ ID NO: 80 - protein, 726 aa, synthetic construct
  REGION 1..726: note = RECOMBINANT SPIKE PROTEIN
MFVFLVLLPLVSSRFPNITNLCPFGEVFNATRFASVYAWNRKRISNCVADYSVLYNSASFSTFKCYGVSPTKLNDLCFTNVYADSFVIRGDEVRQIAPGQTGKIADYNYKLPDDFTGCVIAWNSNNLDSKVGGNYNYLYRLFRKSNLKPFERDISTEIYQAGSTPCNGVEGFNCYFPLQSYGFQPTNGVGYQPYRVVVLSFELLHAPATVCGPKKSGGGSGGGSGGGSGGGSFEAKPSGSVVAEGVECDFSPLLSGTPPQVYNFKRLVFTNCNYNLTKLLSLFSVNDFTCSQISPAAIASNCYSSLILDYFSYPLSMKSDLSVSSAGPISQFNYKQSFSNPTCLILATVPHNLTTITKPLKYSYINKCSRLLSDDRTEVPQLVNANQYSPCVSIVPSTVWEDGDYYRKQLSPLEGGGWLVASGSTVAMTEQLQMGFGITVQYGTDTNSVCPKLEFANDTKIASQLGNCVEYSGGGSGGGSGGGSGGGSRFPNITNLCPFGEVFNATKFPSVYAWERKKISNCVADYSVLYNSTFFSTFKCYGVSATKLNDLCFSNVYADSFVVKGDDVRQIAPGQTGVIADYNYKLPDDFMGCVLAWNTRNIDATSTGNYNYKYRYLRHGKLRPFERDISNVPFSPDGKPCTPPALNCYWPLNDYGFYTTTGIGYQPYRVVVLSFELLNAPATVCGPKLSAIGGYIPEAPRDGQAYVRKDGEWVLLSTFLHHHHHH

SEQ ID NO: 81 - protein, 720 aa, synthetic construct
  REGION 1..720: note = RECOMBINANT SPIKE PROTEIN
MFVFLVLLPLVSSRFPNITNLCPFGEVFNATRFASVYAWNRKRISNCVADYSVLYNSASFSTFKCYGVSPTKLNDLCFTNVYADSFVIRGDEVRQIAPGQTGKIADYNYKLPDDFTGCVIAWNSNNLDSKVGGNYNYLYRLFRKSNLKPFERDISTEIYQAGSTPCNGVEGFNCYFPLQSYGFQPTNGVGYQPYRVVVLSFELLHAPATVCGPKKSGGGSGGGSGGGSGGGSFEAKPSGSVVAEGVECDFSPLLSGTPPQVYNFKRLVFTNCNYNLTKLLSLFSVNDFTCSQISPAAIASNCYSSLILDYFSYPLSMKSDLSVSSAGPISQFNYKQSFSNPTCLILATVPHNLTTITKPLKYSYINKCSRLLSDDRTEVPQLVNANQYSPCVSIVPSTVWEDGDYYRKQLSPLEGGGWLVASGSTVAMTEQLQMGFGITVQYGTDTNSVCPKLEFANDTKIASQLGNCVEYSGGGSGGGSGGGSGGGSRFPNITNLCPFGEVFNATKFPSVYAWERKKISNCVADYSVLYNSTFFSTFKCYGVSATKLNDLCFSNVYADSFVVKGDDVRQIAPGQTGVIADYNYKLPDDFMGCVLAWNTRNIDATSTGNYNYKYRYLRHGKLRPFERDISNVPFSPDGKPCTPPALNCYWPLNDYGFYTTTGIGYQPYRVVVLSFELLNAPATVCGPKLSAIGGYIPEAPRDGQAYVRKDGEWVLLSTFL

SEQ ID NO: 82 - protein, 713 aa, synthetic construct
  REGION 1..713: note = RECOMBINANT SPIKE PROTEIN
RFPNITNLCPFGEVFNATRFASVYAWNRKRISNCVADYSVLYNSASFSTFKCYGVSPTKLNDLCFTNVYADSFVIRGDEVRQIAPGQTGKIADYNYKLPDDFTGCVIAWNSNNLDSKVGGNYNYLYRLFRKSNLKPFERDISTEIYQAGSTPCNGVEGFNCYFPLQSYGFQPTNGVGYQPYRVVVLSFELLHAPATVCGPKKSGGGSGGGSGGGSGGGSFEAKPSGSVVAEGVECDFSPLLSGTPPQVYNFKRLVFTNCNYNLTKLLSLFSVNDFTCSQISPAAIASNCYSSLILDYFSYPLSMKSDLSVSSAGPISQFNYKQSFSNPTCLILATVPHNLTTITKPLKYSYINKCSRLLSDDRTEVPQLVNANQYSPCVSIVPSTVWEDGDYYRKQLSPLEGGGWLVASGSTVAMTEQLQMGFGITVQYGTDTNSVCPKLEFANDTKIASQLGNCVEYSGGGSGGGSGGGSGGGSRFPNITNLCPFGEVFNATKFPSVYAWERKKISNCVADYSVLYNSTFFSTFKCYGVSATKLNDLCFSNVYADSFVVKGDDVRQIAPGQTGVIADYNYKLPDDFMGCVLAWNTRNIDATSTGNYNYKYRYLRHGKLRPFERDISNVPFSPDGKPCTPPALNCYWPLNDYGFYTTTGIGYQPYRVVVLSFELLNAPATVCGPKLSAIGGYIPEAPRDGQAYVRKDGEWVLLSTFLHHHHHH

SEQ ID NO: 83 - protein, 707 aa, synthetic construct
  REGION 1..707: note = RECOMBINANT SPIKE PROTEIN
RFPNITNLCPFGEVFNATRFASVYAWNRKRISNCVADYSVLYNSASFSTFKCYGVSPTKLNDLCFTNVYADSFVIRGDEVRQIAPGQTGKIADYNYKLPDDFTGCVIAWNSNNLDSKVGGNYNYLYRLFRKSNLKPFERDISTEIYQAGSTPCNGVEGFNCYFPLQSYGFQPTNGVGYQPYRVVVLSFELLHAPATVCGPKKSGGGSGGGSGGGSGGGSFEAKPSGSVVAEGVECDFSPLLSGTPPQVYNFKRLVFTNCNYNLTKLLSLFSVNDFTCSQISPAAIASNCYSSLILDYFSYPLSMKSDLSVSSAGPISQFNYKQSFSNPTCLILATVPHNLTTITKPLKYSYINKCSRLLSDDRTEVPQLVNANQYSPCVSIVPSTVWEDGDYYRKQLSPLEGGGWLVASGSTVAMTEQLQMGFGITVQYGTDTNSVCPKLEFANDTKIASQLGNCVEYSGGGSGGGSGGGSGGGSRFPNITNLCPFGEVFNATKFPSVYAWERKKISNCVADYSVLYNSTFFSTFKCYGVSATKLNDLCFSNVYADSFVVKGDDVRQIAPGQTGVIADYNYKLPDDFMGCVLAWNTRNIDATSTGNYNYKYRYLRHGKLRPFERDISNVPFSPDGKPCTPPALNCYWPLNDYGFYTTTGIGYQPYRVVVLSFELLNAPATVCGPKLSAIGGYIPEAPRDGQAYVRKDGEWVLLSTFL

SEQ ID NO: 84 - protein, 1273 aa, synthetic construct
  REGION 1..1273: note = RECOMBINANT SPIKE PROTEIN
MFVFLVLLPLVSSQCVNLTTRTQLPPAYTNSFTRGVYYPDKVFRSSVLHSTQDLFLPFFSNVTWFHAIHVSGTNGTKRFDNPVLPFNDGVYFASTEKSNIIRGWIFGTTLDSKTQSLLIVNNATNVVIKVCEFQFCNDPFLGVYYHKNNKSWMESEFRVYSSANNCTFEYVSQPFLMDLEGKQGNFKNLREFVFKNIDGYFKIYSKHTPINLVRDLPQGFSALEPLVDLPIGINITRFQTLLALHRSYLTPGDSSSGWTAGAAAYYVGYLQPRTFLLKYNENGTITDAVDCALDPLSETKCTLKSFTVEKGIYQTSNFRVQPTESIVRFPNITNLCPFGEVFNATRFASVYAWNRKRISNCVADYSVLYNSASFSTFKCYGVSPTKLNDLCFTNVYADSFVIRGDEVRQIAPGQTGKIADYNYKLPDDFTGCVIAWNSNNLDSKVGGNYNYLYRLFRKSNLKPFERDISTEIYQAGSTPCNGVEGFNCYFPLQSYGFQPTNGVGYQPYRVVVLSFELLHAPATVCGPKKSTNLVKNKCVNFNFNGLTGTGVLTESNKKFLPFQQFGRDIADTTDAVRDPQTLEILDITPCSFGGVSVITPGTNTSNQVAVLYQDVNCTEVPVAIHADQLTPTWRVYSTGSNVFQTRAGCLIGAEHVNNSYECDIPIGAGICASYQTQTNSPRRARSVASQSIIAYTMSLGAENSVAYSNNSIAIPTNFTISVTTEILPVSMTKTSVDCTMYICGDSTECSNLLLQYGSFCTQLNRALTGIAVEQDKNTQEVFAQVKQIYKTPPIKDFGGFNFSQILPDPSKPSKRSFIEDLLFNKVTLADAGFIKQYGDCLGDIAARDLICAQKFNGLTVLPPLLTDEMIAQYTSALLAGTITSGWTFGAGAALQIPFAMQMAYRFNGIGVTQNVLYENQKLIANQFNSAIGKIQDSLSSTASALGKLQDVVNQNAQALNTLVKQLSSNFGAISSVLNDILSRLDPPEAEVQIDRLITGRLQSLQTYVTQQLIRAAEIRASANLAATKMSECVLGQSKRVDFCGKGYHLMSFPQSAPHGVVFLHVTYVPAQEKNFTTAPAICHDGKAHFPREGVFVSNGTHWFVTQRNFYEPQIITTDNTFVSGNCDVVIGIVNNTVYDPLQPELDSFKEELDKYFKNHTSPDVDLGDISGINASVVNIQKEIDRLNEVAKNLNESLIDLQELGKYEQYIKWPWYIWLGFIAGLIAIVMVTIMLCCMTSCCSCLKGCCSCGSCCKFDEDDSEPVLKGVKLHYT

SEQ ID NO: 85 - protein, 1260 aa, synthetic construct
  REGION 1..1260: note = RECOMBINANT SPIKE PROTEIN
QCVNLTTRTQLPPAYTNSFTRGVYYPDKVFRSSVLHSTQDLFLPFFSNVTWFHAIHVSGTNGTKRFDNPVLPFNDGVYFASTEKSNIIRGWIFGTTLDSKTQSLLIVNNATNVVIKVCEFQFCNDPFLGVYYHKNNKSWMESEFRVYSSANNCTFEYVSQPFLMDLEGKQGNFKNLREFVFKNIDGYFKIYSKHTPINLVRDLPQGFSALEPLVDLPIGINITRFQTLLALHRSYLTPGDSSSGWTAGAAAYYVGYLQPRTFLLKYNENGTITDAVDCALDPLSETKCTLKSFTVEKGIYQTSNFRVQPTESIVRFPNITNLCPFGEVFNATRFASVYAWNRKRISNCVADYSVLYNSASFSTFKCYGVSPTKLNDLCFTNVYADSFVIRGDEVRQIAPGQTGKIADYNYKLPDDFTGCVIAWNSNNLDSKVGGNYNYLYRLFRKSNLKPFERDISTEIYQAGSTPCNGVEGFNCYFPLQSYGFQPTNGVGYQPYRVVVLSFELLHAPATVCGPKKSTNLVKNKCVNFNFNGLTGTGVLTESNKKFLPFQQFGRDIADTTDAVRDPQTLEILDITPCSFGGVSVITPGTNTSNQVAVLYQDVNCTEVPVAIHADQLTPTWRVYSTGSNVFQTRAGCLIGAEHVNNSYECDIPIGAGICASYQTQTNSPRRARSVASQSIIAYTMSLGAENSVAYSNNSIAIPTNFTISVTTEILPVSMTKTSVDCTMYICGDSTECSNLLLQYGSFCTQLNRALTGIAVEQDKNTQEVFAQVKQIYKTPPIKDFGGFNFSQILPDPSKPSKRSFIEDLLFNKVTLADAGFIKQYGDCLGDIAARDLICAQKFNGLTVLPPLLTDEMIAQYTSALLAGTITSGWTFGAGAALQIPFAMQMAYRFNGIGVTQNVLYENQKLIANQFNSAIGKIQDSLSSTASALGKLQDVVNQNAQALNTLVKQLSSNFGAISSVLNDILSRLDPPEAEVQIDRLITGRLQSLQTYVTQQLIRAAEIRASANLAATKMSECVLGQSKRVDFCGKGYHLMSFPQSAPHGVVFLHVTYVPAQEKNFTTAPAICHDGKAHFPREGVFVSNGTHWFVTQRNFYEPQIITTDNTFVSGNCDVVIGIVNNTVYDPLQPELDSFKEELDKYFKNHTSPDVDLGDISGINASVVNIQKEIDRLNEVAKNLNESLIDLQELGKYEQYIKWPWYIWLGFIAGLIAIVMVTIMLCCMTSCCSCLKGCCSCGSCCKFDEDDSEPVLKGVKLHYT

SEQ ID NO: 86 - protein, 1273 aa, synthetic construct
  REGION 1..1273: note = RECOMBINANT SPIKE PROTEIN
MFVFLVLLPLVSSQCVNLTTRTQLPPAYTNSFTRGVYYPDKVFRSSVLHSTQDLFLPFFSNVTWFHAIHVSGTNGTKRFDNPVLPFNDGVYFASTEKSNIIRGWIFGTTLDSKTQSLLIVNNATNVVIKVCEFQFCNDPFLGVYYHKNNKSWMESEFRVYSSANNCTFEYVSQPFLMDLEGKQGNFKNLREFVFKNIDGYFKIYSKHTPINLVRDLPQGFSALEPLVDLPIGINITRFQTLLALHRSYLTPGDSSSGWTAGAAAYYVGYLQPRTFLLKYNENGTITDAVDCALDPLSETKCTLKSFTVEKGIYQTSNFRVQPTESIVRFPNITNLCPFGEVFNATRFASVYAWNRKRISNCVADYSVLYNSASFSTFKCYGVSPTKLNDLCFTNVYADSFVIRGDEVRQIAPGQTGKIADYNYKLPDDFTGCVIAWNSNNLDSKVGGNYNYLYRLFRKSNLKPFERDISTEIYQAGSTPCNGVEGFNCYFPLQSYGFQPTNGVGYQPYRVVVLSFELLHAPATVCGPKKSTNLVKNKCVNFNFNGLTGTGVLTESNKKFLPFQQFGRDIADTTDAVRDPQTLEILDITPCSFGGVSVITPGTNTSNQVAVLYQDVNCTEVPVAIHADQLTPTWRVYSTGSNVFQTRAGCLIGAEHVNNSYECDIPIGAGICASYQTQTNSPQQAQSVASQSIIAYTMSLGAENSVAYSNNSIAIPTNFTISVTTEILPVSMTKTSVDCTMYICGDSTECSNLLLQYGSFCTQLNRALTGIAVEQDKNTQEVFAQVKQIYKTPPIKDFGGFNFSQILPDPSKPSKRSFIEDLLFNKVTLADAGFIKQYGDCLGDIAARDLICAQKFNGLTVLPPLLTDEMIAQYTSALLAGTITSGWTFGAGAALQIPFAMQMAYRFNGIGVTQNVLYENQKLIANQFNSAIGKIQDSLSSTASALGKLQDVVNQNAQALNTLVKQLSSNFGAISSVLNDILSRLDPPEAEVQIDRLITGRLQSLQTYVTQQLIRAAEIRASANLAATKMSECVLGQSKRVDFCGKGYHLMSFPQSAPHGVVFLHVTYVPAQEKNFTTAPAICHDGKAHFPREGVFVSNGTHWFVTQRNFYEPQIITTDNTFVSGNCDVVIGIVNNTVYDPLQPELDSFKEELDKYFKNHTSPDVDLGDISGINASVVNIQKEIDRLNEVAKNLNESLIDLQELGKYEQYIKWPWYIWLGFIAGLIAIVMVTIMLCCMTSCCSCLKGCCSCGSCCKFDEDDSEPVLKGVKLHYT

SEQ ID NO: 87 - protein, 1260 aa, synthetic construct
  REGION 1..1260: note = RECOMBINANT SPIKE PROTEIN
QCVNLTTRTQLPPAYTNSFTRGVYYPDKVFRSSVLHSTQDLFLPFFSNVTWFHAIHVSGTNGTKRFDNPVLPFNDGVYFASTEKSNIIRGWIFGTTLDSKTQSLLIVNNATNVVIKVCEFQFCNDPFLGVYYHKNNKSWMESEFRVYSSANNCTFEYVSQPFLMDLEGKQGNFKNLREFVFKNIDGYFKIYSKHTPINLVRDLPQGFSALEPLVDLPIGINITRFQTLLALHRSYLTPGDSSSGWTAGAAAYYVGYLQPRTFLLKYNENGTITDAVDCALDPLSETKCTLKSFTVEKGIYQTSNFRVQPTESIVRFPNITNLCPFGEVFNATRFASVYAWNRKRISNCVADYSVLYNSASFSTFKCYGVSPTKLNDLCFTNVYADSFVIRGDEVRQIAPGQTGKIADYNYKLPDDFTGCVIAWNSNNLDSKVGGNYNYLYRLFRKSNLKPFERDISTEIYQAGSTPCNGVEGFNCYFPLQSYGFQPTNGVGYQPYRVVVLSFELLHAPATVCGPKKSTNLVKNKCVNFNFNGLTGTGVLTESNKKFLPFQQFGRDIADTTDAVRDPQTLEILDITPCSFGGVSVITPGTNTSNQVAVLYQDVNCTEVPVAIHADQLTPTWRVYSTGSNVFQTRAGCLIGAEHVNNSYECDIPIGAGICASYQTQTNSPQQAQSVASQSIIAYTMSLGAENSVAYSNNSIAIPTNFTISVTTEILPVSMTKTSVDCTMYICGDSTECSNLLLQYGSFCTQLNRALTGIAVEQDKNTQEVFAQVKQIYKTPPIKDFGGFNFSQILPDPSKPSKRSFIEDLLFNKVTLADAGFIKQYGDCLGDIAARDLICAQKFNGLTVLPPLLTDEMIAQYTSALLAGTITSGWTFGAGAALQIPFAMQMAYRFNGIGVTQNVLYENQKLIANQFNSAIGKIQDSLSSTASALGKLQDVVNQNAQALNTLVKQLSSNFGAISSVLNDILSRLDPPEAEVQIDRLITGRLQSLQTYVTQQLIRAAEIRASANLAATKMSECVLGQSKRVDFCGKGYHLMSFPQSAPHGVVFLHVTYVPAQEKNFTTAPAICHDGKAHFPREGVFVSNGTHWFVTQRNFYEPQIITTDNTFVSGNCDVVIGIVNNTVYDPLQPELDSFKEELDKYFKNHTSPDVDLGDISGINASVVNIQKEIDRLNEVAKNLNESLIDLQELGKYEQYIKWPWYIWLGFIAGLIAIVMVTIMLCCMTSCCSCLKGCCSCGSCCKFDEDDSEPVLKGVKLHYT

SEQ ID NO: 88 - protein, 1219 aa, synthetic construct
  REGION 1..1219: note = RECOMBINANT SPIKE PROTEIN
MFVFLVLLPLVSSQCVNLTTRTQLPPAYTNSFTRGVYYPDKVFRSSVLHSTQDLFLPFFSNVTWFHAIHVSGTNGTKRFDNPVLPFNDGVYFASTEKSNIIRGWIFGTTLDSKTQSLLIVNNATNVVIKVCEFQFCNDPFLGVYYHKNNKSWMESEFRVYSSANNCTFEYVSQPFLMDLEGKQGNFKNLREFVFKNIDGYFKIYSKHTPINLVRDLPQGFSALEPLVDLPIGINITRFQTLLALHRSYLTPGDSSSGWTAGAAAYYVGYLQPRTFLLKYNENGTITDAVDCALDPLSETKCTLKSFTVEKGIYQTSNFRVQPTESIVRFPNITNLCPFGEVFNATRFASVYAWNRKRISNCVADYSVLYNSASFSTFKCYGVSPTKLNDLCFTNVYADSFVIRGDEVRQIAPGQTGKIADYNYKLPDDFTGCVIAWNSNNLDSKVGGNYNYLYRLFRKSNLKPFERDISTEIYQAGSTPCNGVEGFNCYFPLQSYGFQPTNGVGYQPYRVVVLSFELLHAPATVCGPKKSTNLVKNKCVNFNFNGLTGTGVLTESNKKFLPFQQFGRDIADTTDAVRDPQTLEILDITPCSFGGVSVITPGTNTSNQVAVLYQDVNCTEVPVAIHADQLTPTWRVYSTGSNVFQTRAGCLIGAEHVNNSYECDIPIGAGICASYQTQTNSPQQAQSVASQSIIAYTMSLGAENSVAYSNNSIAIPTNFTISVTTEILPVSMTKTSVDCTMYICGDSTECSNLLLQYGSFCTQLNRALTGIAVEQDKNTQEVFAQVKQIYKTPPIKDFGGFNFSQILPDPSKPSKRSFIEDLLFNKVTLADAGFIKQYGDCLGDIAARDLICAQKFNGLTVLPPLLTDEMIAQYTSALLAGTITSGWTFGAGAALQIPFAMQMAYRFNGIGVTQNVLYENQKLIANQFNSAIGKIQDSLSSTASALGKLQDVVNQNAQALNTLVKQLSSNFGAISSVLNDILSRLDPPEAEVQIDRLITGRLQSLQTYVTQQLIRAAEIRASANLAATKMSECVLGQSKRVDFCGKGYHLMSFPQSAPHGVVFLHVTYVPAQEKNFTTAPAICHDGKAHFPREGVFVSNGTHWFVTQRNFYEPQIITTDNTFVSGNCDVVIGIVNNTVYDPLQPELDSFKEELDKYFKNHTSPDVDLGDISGINASVVNIQKEIDRLNEVAKNLNESLIDLQELGKYEQYIKWPHHHHHH

SEQ ID NO: 89 - protein, 1206 aa, synthetic construct
  REGION 1..1206: note = RECOMBINANT SPIKE PROTEIN
QCVNLTTRTQLPPAYTNSFTRGVYYPDKVFRSSVLHSTQDLFLPFFSNVTWFHAIHVSGTNGTKRFDNPVLPFNDGVYFASTEKSNIIRGWIFGTTLDSKTQSLLIVNNATNVVIKVCEFQFCNDPFLGVYYHKNNKSWMESEFRVYSSANNCTFEYVSQPFLMDLEGKQGNFKNLREFVFKNIDGYFKIYSKHTPINLVRDLPQGFSALEPLVDLPIGINITRFQTLLALHRSYLTPGDSSSGWTAGAAAYYVGYLQPRTFLLKYNENGTITDAVDCALDPLSETKCTLKSFTVEKGIYQTSNFRVQPTESIVRFPNITNLCPFGEVFNATRFASVYAWNRKRISNCVADYSVLYNSASFSTFKCYGVSPTKLNDLCFTNVYADSFVIRGDEVRQIAPGQTGKIADYNYKLPDDFTGCVIAWNSNNLDSKVGGNYNYLYRLFRKSNLKPFERDISTEIYQAGSTPCNGVEGFNCYFPLQSYGFQPTNGVGYQPYRVVVLSFELLHAPATVCGPKKSTNLVKNKCVNFNFNGLTGTGVLTESNKKFLPFQQFGRDIADTTDAVRDPQTLEILDITPCSFGGVSVITPGTNTSNQVAVLYQDVNCTEVPVAIHADQLTPTWRVYSTGSNVFQTRAGCLIGAEHVNNSYECDIPIGAGICASYQTQTNSPQQAQSVASQSIIAYTMSLGAENSVAYSNNSIAIPTNFTISVTTEILPVSMTKTSVDCTMYICGDSTECSNLLLQYGSFCTQLNRALTGIAVEQDKNTQEVFAQVKQIYKTPPIKDFGGFNFSQILPDPSKPSKRSFIEDLLFNKVTLADAGFIKQYGDCLGDIAARDLICAQKFNGLTVLPPLLTDEMIAQYTSALLAGTITSGWTFGAGAALQIPFAMQMAYRFNGIGVTQNVLYENQKLIANQFNSAIGKIQDSLSSTASALGKLQDVVNQNAQALNTLVKQLSSNFGAISSVLNDILSRLDPPEAEVQIDRLITGRLQSLQTYVTQQLIRAAEIRASANLAATKMSECVLGQSKRVDFCGKGYHLMSFPQSAPHGVVFLHVTYVPAQEKNFTTAPAICHDGKAHFPREGVFVSNGTHWFVTQRNFYEPQIITTDNTFVSGNCDVVIGIVNNTVYDPLQPELDSFKEELDKYFKNHTSPDVDLGDISGINASVVNIQKEIDRLNEVAKNLNESLIDLQELGKYEQYIKWPHHHHHH

SEQ ID NO: 90 - protein, 17 aa, synthetic construct
  REGION 1..17: note = Linker
SGGGSGGGSGGGSGGGS

SEQ ID NO: 91 - protein, 4 aa, synthetic construct
  REGION 1..4: note = Linker
SGGG

SEQ ID NO: 92 - protein, 4 aa, synthetic construct
  REGION 1..4: note = Linker
GGGS

SEQ ID NO: 93 - protein, 5 aa, synthetic construct
  REGION 1..5: note = Linker
GGGGS

SEQ ID NO: 94 - protein, 90 aa, synthetic construct
  REGION 1..90: note = RECOMBINANT SPIKE PROTEIN
STNLVKNKCVNFNFNGLTGTGVLTESNKKFLPFQQFGRDIADTTDAVRDPQTLEILDITPCSFGGVSVITPGTNTSNQVAVLYQDVNCTE

SEQ ID NO: 95 - DNA, 3639 bp, synthetic construct
  misc_feature 1..3639: note = RECOMBINANT SPIKE PROTEIN
  source 1..3639: mol_type = other DNA
atgttcgtcttcctggtgctgctgcccctggtgtccagccagtgcgtgaacctgaccactaggactcagctgcctcccgcttacaccaactcattcactcgcggtgtgtactaccctgacaaggtcttccgttcttcagtgctgcactcaactcaggacctgttcctgcccttcttctccaacgtcacctggttccacgccatccacgtgtccggcaccaacggcactaagcgcttcgacaacccagtgctgcctttcaacgacggtgtctacttcgcttcaaccgagaagtccaacatcatccgtggatggatcttcggcaccactctggacagcaagactcagtctctgctgatcgtcaacaacgccaccaacgtggtcatcaaggtctgcgaattccagttctgcaacgacccattcctgggcgtctactaccacaagaacaacaagtcatggatggagtccgaattccgcgtctactccagcgctaacaactgcactttcgagtacgtgtcccagcctttcctgatggacctggaaggaaagcagggtaacttcaagaacctgagggagttcgtgttcaagaacatcgacggatacttcaagatttacagcaagcacaccccaatcaacctggtgcgcgacctgcctcagggtttctctgctctggagccactggtggacctgcctatcggcatcaacatcacccgcttccagactctgctggctctgcaccgttcctacctgactccaggcgactcatcttctggatggactgctggagctgctgcttactacgtgggctacctgcagcctcgcaccttcctgctgaagtacaacgaaaacggaaccatcactgacgccgtcgactgcgctctggaccctctgtcagaaaccaagtgcactctgaagtccttcaccgtggagaagggcatctaccagacttcaaacttcagggtgcagcccaccgaatccatcgtcagattccctaacatcactaacctgtgccccttcggagaggtcttcaacgccacccgcttcgcttccgtgtacgcctggaacaggaagagaatctcaaactgcgtcgctgactactccgtgctgtacaactcagcctccttcagcaccttcaagtgctacggcgtgtcaccaactaagctgaacgacctgtgcttcaccaacgtctacgccgactccttcgtgatcaggggagacgaggtcagacagatcgctcctggccagactggaaagatcgccgactacaactacaagctgcccgacgacttcaccggttgcgtcatcgcttggaacagcaacaacctggactctaaagtgggtggcaactacaactacctgtaccgcctgttccgtaagtcaaacctgaagccattcgagagggacatcagcactgaaatctaccaggccggatctaccccttgcaacggtgtcgagggcttcaactgctacttccccctgcagtcctacggtttccagccaactaacggtgtgggctaccagccttacagagtggtcgtgctgagcttcgaactgctccacgctcctgctactgtgtgcggtccaaagaagtctaccaacctggtcaagaacaagtgcgtgaacttcaacttcaacggcctgaccggaactggtgtcctgaccgagagcaacaagaagttcctgcccttccagcagttcggaagggacatcgctgacaccactgacgctgtgcgcgaccctcagaccctggaaatcctggacatcactccatgctcattcggaggtgtctccgtgatcacccctggcaccaacacttctaaccaggtcgctgtgctgtaccaggacgtcaactgcaccgaggtccctgtggccatccacgctgaccagctgacccccacttggcgcgtgtactccaccggcagcaacgtgttccagactcgtgctggttgcctgatcggcgccgagcacgtgaacaacagctacgaatgcgacatccccatcggcgctggaatctgcgcctcttaccagacccagactaacagcccacgcagggctcgctctgtggcctctcagtcaatcatcgcttacaccatgtcactgggcgctgaaaactccgtggcctactctaacaactcaatcgccatccccaccaacttcactatcagcgtgaccactgagatcctgccagtcagcatgaccaagacttctgtggactgcactatgtacatctgcggagacagcaccgaatgctctaacctgctgctgcagtacggctctttctgcacccagctgaaccgtgctctgactggaatcgccgtggagcaggacaagaacactcaggaagtcttcgctcaggtgaagcaaatctacaagaccccacctatcaaggacttcggcggattcaacttctcccagatcctgcctgacccctccaagccaagcaagcgctctttcatcgaggacctgctgttcaacaaggtcactctggccgacgctggattcatcaagcagtacggagactgcctgggtgacatcgccgctcgtgacctgatctgcgctcagaagttcaacggtctgaccgtgctgcccccactgctgactgacgaaatgatcgcccagtacactagcgccctgctggctggaaccatcacttctggttggaccttcggtgctggcgccgctctgcagatccctttcgctatgcagatggcctaccgtttcaacggaatcggtgtcacccagaacgtgctgtacgagaaccagaagctgatcgctaaccagttcaactcagccatcggaaagatccaggacagcctgagctctactgcctctgctctgggcaagctgcaggacgtcgtgaaccagaacgcccaggctctgaacaccctggtcaagcagctgtcatccaacttcggtgctatcagctctgtgctgaacgacatcctgtcccgcctggacaaggtcgaggccgaagtgcagatcgaccgcctgatcactggccgtctgcagtcactgcagacctacgtgactcagcagctgatcagggccgctgaaatcagagcctccgctaacctggccgctaccaagatgagcgagtgcgtcctgggtcaatctaagcgtgtggacttctgcggcaagggataccacctgatgtcattccctcagtctgctccccacggtgtggtgttcctgcacgtcacctacgtgccagcccaggagaagaacttcaccactgcccctgctatctgccacgacggcaaggctcacttccccagggaaggtgtcttcgtgagcaacggcacccactggttcgtcactcagagaaacttctacgagccacagatcatcaccactgacaacactttcgtgtctggaaactgcgacgtggtcatcggtatcgtcaacaacaccgtgtacgaccccctgcagccagagctggactcattcaaggaggaactggacaagtacttcaagaaccacacctcccctgacgtcgacctgggcgacatctcaggaatcaacgcttccgtcgtgaacatccagaaggagatcgaccgcctgaacgaagtggccaagaacctgaacgaaagcctgatcgacctgcaggagctgggcaagtacgaacagtacatcaagtggcct

SEQ ID NO: 96 - DNA, 3822 bp, synthetic construct
  misc_feature 1..3822: note = RECOMBINANT SPIKE PROTEIN
  source 1..3822: mol_type = other DNA
atgttcgtcttcctggtgctgctgcccctggtgtccagccagtgcgtgaacctgaccactaggactcagctgcctcccgcttacaccaactcattcactcgcggtgtgtactaccctgacaaggtcttccgttcttcagtgctgcactcaactcaggacctgttcctgcccttcttctccaacgtcacctggttccacgccatccacgtgtccggcaccaacggcactaagcgcttcgacaacccagtgctgcctttcaacgacggtgtctacttcgcttcaaccgagaagtccaacatcatccgtggatggatcttcggcaccactctggacagcaagactcagtctctgctgatcgtcaacaacgccaccaacgtggtcatcaaggtctgcgaattccagttctgcaacgacccattcctgggcgtctactaccacaagaacaacaagtcatggatggagtccgaattccgcgtctactccagcgctaacaactgcactttcgagtacgtgtcccagcctttcctgatggacctggaaggaaagcagggtaacttcaagaacctgagggagttcgtgttcaagaacatcgacggatacttcaagatttacagcaagcacaccccaatcaacctggtgcgcgacctgcctcagggtttctctgctctggagccactggtggacctgcctatcggcatcaacatcacccgcttccagactctgctggctctgcaccgttcctacctgactccaggcgactcatcttctggatggactgctggagctgctgcttactacgtgggctacctgcagcctcgcaccttcctgctgaagtacaacgaaaacggaaccatcactgacgccgtcgactgcgctctggaccctctgtcagaaaccaagtgcactctgaagtccttcaccgtggagaagggcatctaccagacttcaaacttcagggtgcagcccaccgaatccatcgtcagattccctaacatcactaacctgtgccccttcggagaggtcttcaacgccacccgcttcgcttccgtgtacgcctggaacaggaagagaatctcaaactgcgtcgctgactactccgtgctgtacaactcagcctccttcagcaccttcaagtgctacggcgtgtcaccaactaagctgaacgacctgtgcttcaccaacgtctacgccgactccttcgtgatcaggggagacgaggtcagacagatcgctcctggccagactggaaagatcgccgactacaactacaagctgcccgacgacttcaccggttgcgtcatcgcttggaacagcaacaacctggactctaaagtgggtggcaactacaactacctgtaccgcctgttccgtaagtcaaacctgaagccattcgagagggacatcagcactgaaatctaccaggccggatctaccccttgcaacggtgtcgagggcttcaactgctacttccccctgcagtcctacggtttccagccaactaacggtgtgggctaccagccttacagagtggtcgtgctgagcttcgaactgctccacgctcctgctactgtgtgcggtccaaagaagtctaccaacctggtcaagaacaagtgcgtgaacttcaacttcaacggcctgaccggaactggtgtcctgaccgagagcaacaagaagttcctgcccttccagcagttcggaagggacatcgctgacaccactgacgctgtgcgcgaccctcagaccctggaaatcctggacatcactccatgctcattcggaggtgtctccgtgatcacccctggcaccaacacttctaaccaggtcgctgtgctgtaccaggacgtcaactgcaccgaggtccctgtggccatccacgctgaccagctgacccccacttggcgcgtgtactccaccggcagcaacgtgttccagactcgtgctggttgcctgatcggcgccgagcacgtgaacaacagctacgaatgcgacatccccatcggcgctggaatctgcgcctcttaccagacccagactaacagcccacagcaggctcagtctgtggcctctcagtcaatcatcgcttacaccatgtcactgggcgctgaaaactccgtggcctactctaacaactcaatcgccatccccaccaacttcactatcagcgtgaccactgagatcctgccagtcagcatgaccaagacttctgtggactgcactatgtacatctgcggagacagcaccgaatgctctaacctgctgctgcagtacggctctttctgcacccagctgaaccgtgctctgactggaatcgccgtggagcaggacaagaacactcaggaagtcttcgctcaggtgaagcaaatctacaagaccccacctatcaaggacttcggcggattcaacttctcccagatcctgcctgacccctccaagccaagcaagcgctctttcatcgaggacctgctgttcaacaaggtcactctggccgacgctggattcatcaagcagtacggagactgcctgggtgacatcgccgctcgtgacctgatctgcgctcagaagttcaacggtctgaccgtgctgcccccactgctgactgacgaaatgatcgcccagtacactagcgccctgctggctggaaccatcacttctggttggaccttcggtgctggcgccgctctgcagatccctttcgctatgcagatggcctaccgtttcaacggaatcggtgtcacccagaacgtgctgtacgagaaccagaagctgatcgctaaccagttcaactcagccatcggaaagatccaggacagcctgagctctactgcctctgctctgggcaagctgcaggacgtcgtgaaccagaacgcccaggctctgaacaccctggtcaagcagctgtcatccaacttcggtgctatcagctctgtgctgaacgacatcctgtcccgcctggaccctcccgaggccgaagtgcagatcgaccgcctgatcactggccgtctgcagtcactgcagacctacgtgactcagcagctgatcagggccgctgaaatcagagcctccgctaacctggccgctaccaagatgagcgagtgcgtcctgggtcaatctaagcgtgtggacttctgcggcaagggataccacctgatgtcattccctcagtctgctccccacggtgtggtgttcctgcacgtcacctacgtgccagcccaggagaagaacttcaccactgcccctgctatctgccacgacggcaaggctcacttccccagggaaggtgtcttcgtgagcaacggcacccactggttcgtcactcagagaaacttctacgagccacagatcatcaccactgacaacactttcgtgtctggaaactgcgacgtggtcatcggtatcgtcaacaacaccgtgtacgaccccctgcagccagagctggactcattcaaggaggaactggacaagtacttcaagaaccacacctcccctgacgtcgacctgggcgacatctcaggaatcaacgcttccgtcgtgaacatccagaaggagatcgaccgcctgaacgaagtggccaagaacctgaacgaaagcctgatcgacctgcaggagctgggcaagtacgaacagtacatcaagtggccttggtacatctggctgggtttcatcgctggcctcatcgctatcgtgatggtgaccatcatgctgtgctgcatgacttcatgctgctcctgcctgaagggctgctgcagctgcggatcttgctgcaagttcgacgaggacgactctgaacccgtcctgaagggcgtgaagctgcactacacctaa

SEQ ID NO: 97 - protein, 4 aa, synthetic construct
  REGION 1..4: note = Recombinant Furin Cleavage Site
GSAS

SEQ ID NO: 98 - protein, 8 aa, synthetic construct
  REGION 1..8: note = HRV3C Cleavage Site
LEVLFQGP

SEQ ID NO: 99 - protein, 8 aa, synthetic construct
  REGION 1..8: note = Strep-tag
WSHPQFEK

SEQ ID NO: 100 - protein, 6 aa, synthetic construct
  REGION 1..6: note = 6X-His Tag
HHHHHH

SEQ ID NO: 101 - protein, 10 aa, synthetic construct
  REGION 1..10: note = His-Tag
  SITE 6: note = May be present or absent
  SITE 7: note = May be present or absent
  SITE 8: note = May be present or absent
  SITE 9: note = May be present or absent
  SITE 10: note = May be present or absent
HHHHHHHHHH

SEQ ID NO: 102 - protein, 8 aa, synthetic construct
  REGION 1..8: note = 8X-His Tag
HHHHHHHH

SEQ ID NO: 103 - protein, 30 aa, synthetic construct
  REGION 1..30: note = FOLDON
GYIPEAPRDGQAYVRKDGEWVLLSTFLSPA

SEQ ID NO: 104 - protein, 10 aa, synthetic construct
  REGION 1..10: note = RECOMBINANT SPIKE PROTEIN
EDLLFNKVTL

SEQ ID NO: 105 - protein, 1263 aa, synthetic construct
  REGION 1..1263: note = RECOMBINANT SPIKE PROTEIN
MFVFLVLLPLVSSQCVNLTTRTQLPPAYTNSFTRGVYYPDKVFRSSVLHSTQDLFLPFFSNVTWFHAIHVSGTNGTKRFDNPVLPFNDGVYFASTEKSNIIRGWIFGTTLDSKTQSLLIVNNATNVVIKVCEFQFCNDPFLGVYYHKNNKSWMESEFRVYSSANNCTFEYVSQPFLMDLEGKQGNFKNLREFVFKNIDGYFKIYSKHTPINLVRDLPQGFSALEPLVDLPIGINITRFQTLLALHRSYLTPGDSSSGWTAGAAAYYVGYLQPRTFLLKYNENGTITDAVDCALDPLSETKCTLKSFTVEKGIYQTSNFRVQPTESIVRFPNITNLCPFGEVFNATRFASVYAWNRKRISNCVADYSVLYNSASFSTFKCYGVSPTKLNDLCFTNVYADSFVIRGDEVRQIAPGQTGKIADYNYKLPDDFTGCVIAWNSNNLDSKVGGNYNYLYRLFRKSNLKPFERDISTEIYQAGSTPCNGVEGFNCYFPLQSYGFQPTNGVGYQPYRVVVLSFELLHAPATVCGPKKSTNLVKNKCVNFNFNGLTGTGVLTESNKKFLPFQQFGRDIADTTDAVRDPQTLEILDITPCSFGGVSVITPGTNTSNQVAVLYQDVNCTEVPVAIHADQLTPTWRVYSTGSNVFQTRAGCLIGAEHVNNSYECDIPIGAGICASYQTQTNSPQQAQSVASQSIIAYTMSLGAENSVAYSNNSIAIPTNFTISVTTEILPVSMTKTSVDCTMYICGDSTECSNLLLQYGSFCTQLNRALTGIAVEQDKNTQEVFAQVKQIYKTPPIKDFGGFNFSQILPDPSKPSKRSFIADAGFIKQYGDCLGDIAARDLICAQKFNGLTVLPPLLTDEMIAQYTSALLAGTITSGWTFGAGAALQIPFAMQMAYRFNGIGVTQNVLYENQKLIANQFNSAIGKIQDSLSSTASALGKLQDVVNQNAQALNTLVKQLSSNFGAISSVLNDILSRLDPPEAEVQIDRLITGRLQSLQTYVTQQLIRAAEIRASANLAATKMSECVLGQSKRVDFCGKGYHLMSFPQSAPHGVVFLHVTYVPAQEKNFTTAPAICHDGKAHFPREGVFVSNGTHWFVTQRNFYEPQIITTDNTFVSGNCDVVIGIVNNTVYDPLQPELDSFKEELDKYFKNHTSPDVDLGDISGINASVVNIQKEIDRLNEVAKNLNESLIDLQELGKYEQYIKWPWYIWLGFIAGLIAIVMVTIMLCCMTSCCSCLKGCCSCGSCCKFDEDDSEPVLKGVKLHYT

SEQ ID NO: 106 - protein, 1250 aa, synthetic construct
  REGION 1..1250: note = RECOMBINANT SPIKE PROTEIN
QCVNLTTRTQLPPAYTNSFTRGVYYPDKVFRSSVLHSTQDLFLPFFSNVTWFHAIHVSGTNGTKRFDNPVLPFNDGVYFASTEKSNIIRGWIFGTTLDSKTQSLLIVNNATNVVIKVCEFQFCNDPFLGVYYHKNNKSWMESEFRVYSSANNCTFEYVSQPFLMDLEGKQGNFKNLREFVFKNIDGYFKIYSKHTPINLVRDLPQGFSALEPLVDLPIGINITRFQTLLALHRSYLTPGDSSSGWTAGAAAYYVGYLQPRTFLLKYNENGTITDAVDCALDPLSETKCTLKSFTVEKGIYQTSNFRVQPTESIVRFPNITNLCPFGEVFNATRFASVYAWNRKRISNCVADYSVLYNSASFSTFKCYGVSPTKLNDLCFTNVYADSFVIRGDEVRQIAPGQTGKIADYNYKLPDDFTGCVIAWNSNNLDSKVGGNYNYLYRLFRKSNLKPFERDISTEIYQAGSTPCNGVEGFNCYFPLQSYGFQPTNGVGYQPYRVVVLSFELLHAPATVCGPKKSTNLVKNKCVNFNFNGLTGTGVLTESNKKFLPFQQFGRDIADTTDAVRDPQTLEILDITPCSFGGVSVITPGTNTSNQVAVLYQDVNCTEVPVAIHADQLTPTWRVYSTGSNVFQTRAGCLIGAEHVNNSYECDIPIGAGICASYQTQTNSPQQAQSVASQSIIAYTMSLGAENSVAYSNNSIAIPTNFTISVTTEILPVSMTKTSVDCTMYICGDSTECSNLLLQYGSFCTQLNRALTGIAVEQDKNTQEVFAQVKQIYKTPPIKDFGGFNFSQILPDPSKPSKRSFIADAGFIKQYGDCLGDIAARDLICAQKFNGLTVLPPLLTDEMIAQYTSALLAGTITSGWTFGAGAALQIPFAMQMAYRFNGIGVTQNVLYENQKLIANQFNSAIGKIQDSLSSTASALGKLQDVVNQNAQALNTLVKQLSSNFGAISSVLNDILSRLDPPEAEVQIDRLITGRLQSLQTYVTQQLIRAAEIRASANLAATKMSECVLGQSKRVDFCGKGYHLMSFPQSAPHGVVFLHVTYVPAQEKNFTTAPAICHDGKAHFPREGVFVSNGTHWFVTQRNFYEPQIITTDNTFVSGNCDVVIGIVNNTVYDPLQPELDSFKEELDKYFKNHTSPDVDLGDISGINASVVNIQKEIDRLNEVAKNLNESLIDLQELGKYEQYIKWPWYIWLGFIAGLIAIVMVTIMLCCMTSCCSCLKGCCSCGSCCKFDEDDSEPVLKGVKLHYT

SEQ ID NO: 107 - protein, 1263 aa, synthetic construct
  REGION 1..1263: note = RECOMBINANT SPIKE PROTEIN
MFVFLVLLPLVSSQCVNLTTRTQLPPAYTNSFTRGVYYPDKVFRSSVLHSTQDLFLPFFSNVTWFHAIHVSGTNGTKRFDNPVLPFNDGVYFASTEKSNIIRGWIFGTTLDSKTQSLLIVNNATNVVIKVCEFQFCNDPFLGVYYHKNNKSWMESEFRVYSSANNCTFEYVSQPFLMDLEGKQGNFKNLREFVFKNIDGYFKIYSKHTPINLVRDLPQGFSALEPLVDLPIGINITRFQTLLALHRSYLTPGDSSSGWTAGAAAYYVGYLQPRTFLLKYNENGTITDAVDCALDPLSETKCTLKSFTVEKGIYQTSNFRVQPTESIVRFPNITNLCPFGEVFNATRFASVYAWNRKRISNCVADYSVLYNSASFSTFKCYGVSPTKLNDLCFTNVYADSFVIRGDEVRQIAPGQTGKIADYNYKLPDDFTGCVIAWNSNNLDSKVGGNYNYLYRLFRKSNLKPFERDISTEIYQAGSTPCNGVEGFNCYFPLQSYGFQPTNGVGYQPYRVVVLSFELLHAPATVCGPKKSTNLVKNKCVNFNFNGLTGTGVLTESNKKFLPFQQFGRDIADTTDAVRDPQTLEILDITPCSFGGVSVITPGTNTSNQVAVLYQDVNCTEVPVAIHADQLTPTWRVYSTGSNVFQTRAGCLIGAEHVNNSYECDIPIGAGICASYQTQTNSPRRARSVASQSIIAYTMSLGAENSVAYSNNSIAIPTNFTISVTTEILPVSMTKTSVDCTMYICGDSTECSNLLLQYGSFCTQLNRALTGIAVEQDKNTQEVFAQVKQIYKTPPIKDFGGFNFSQILPDPSKPSKRSFIADAGFIKQYGDCLGDIAARDLICAQKFNGLTVLPPLLTDEMIAQYTSALLAGTITSGWTFGAGAALQIPFAMQMAYRFNGIGVTQNVLYENQKLIANQFNSAIGKIQDSLSSTASALGKLQDVVNQNAQALNTLVKQLSSNFGAISSVLNDILSRLDKVEAEVQIDRLITGRLQSLQTYVTQQLIRAAEIRASANLAATKMSECVLGQSKRVDFCGKGYHLMSFPQSAPHGVVFLHVTYVPAQEKNFTTAPAICHDGKAHFPREGVFVSNGTHWFVTQRNFYEPQIITTDNTFVSGNCDVVIGIVNNTVYDPLQPELDSFKEELDKYFKNHTSPDVDLGDISGINASVVNIQKEIDRLNEVAKNLNESLIDLQELGKYEQYIKWPWYIWLGFIAGLIAIVMVTIMLCCMTSCCSCLKGCCSCGSCCKFDEDDSEPVLKGVKLHYT

SEQ ID NO: 108 - protein, 1250 aa, synthetic construct
  REGION 1..1250: note = RECOMBINANT SPIKE PROTEIN
QCVNLTTRTQLPPAYTNSFTRGVYYPDKVFRSSVLHSTQDLFLPFFSNVTWFHAIHVSGTNGTKRFDNPVLPFNDGVYFASTEKSNIIRGWIFGTTLDSKTQSLLIVNNATNVVIKVCEFQFCNDPFLGVYYHKNNKSWMESEFRVYSSANNCTFEYVSQPFLMDLEGKQGNFKNLREFVFKNIDGYFKIYSKHTPINLVRDLPQGFSALEPLVDLPIGINITRFQTLLALHRSYLTPGDSSSGWTAGAAAYYVGYLQPRTFLLKYNENGTITDAVDCALDPLSETKCTLKSFTVEKGIYQTSNFRVQPTESIVRFPNITNLCPFGEVFNATRFASVYAWNRKRISNCVADYSVLYNSASFSTFKCYGVSPTKLNDLCFTNVYADSFVIRGDEVRQIAPGQTGKIADYNYKLPDDFTGCVIAWNSNNLDSKVGGNYNYLYRLFRKSNLKPFERDISTEIYQAGSTPCNGVEGFNCYFPLQSYGFQPTNGVGYQPYRVVVLSFELLHAPATVCGPKKSTNLVKNKCVNFNFNGLTGTGVLTESNKKFLPFQQFGRDIADTTDAVRDPQTLEILDITPCSFGGVSVITPGTNTSNQVAVLYQDVNCTEVPVAIHADQLTPTWRVYSTGSNVFQTRAGCLIGAEHVNNSYECDIPIGAGICASYQTQTNSPRRARSVASQSIIAYTMSLGAENSVAYSNNSIAIPTNFTISVTTEILPVSMTKTSVDCTMYICGDSTECSNLLLQYGSFCTQLNRALTGIAVEQDKNTQEVFAQVKQIYKTPPIKDFGGFNFSQILPDPSKPSKRSFIADAGFIKQYGDCLGDIAARDLICAQKFNGLTVLPPLLTDEMIAQYTSALLAGTITSGWTFGAGAALQIPFAMQMAYRFNGIGVTQNVLYENQKLIANQFNSAIGKIQDSLSSTASALGKLQDVVNQNAQALNTLVKQLSSNFGAISSVLNDILSRLDKVEAEVQIDRLITGRLQSLQTYVTQQLIRAAEIRASANLAATKMSECVLGQSKRVDFCGKGYHLMSFPQSAPHGVVFLHVTYVPAQEKNFTTAPAICHDGKAHFPREGVFVSNGTHWFVTQRNFYEPQIITTDNTFVSGNCDVVIGIVNNTVYDPLQPELDSFKEELDKYFKNHTSPDVDLGDISGINASVVNIQKEIDRLNEVAKNLNESLIDLQELGKYEQYIKWPWYIWLGFIAGLIAIVMVTIMLCCMTSCCSCLKGCCSCGSCCKFDEDDSEPVLKGVKLHYT

SEQ ID NO: 109 - protein, 1273 aa, synthetic construct
  REGION 1..1273: note = Recombinant CoV S polypeptide
MFVFLVLLPLVSSQCVNLTTRTQLPPAYTNSFTRGVYYPDKVFRSSVLHSTQDLFLPFFSNVTWFHAIHVSGTNGTKRFDNPVLPFNDGVYFASTEKSNIIRGWIFGTTLDSKTQSLLIVNNATNVVIKVCEFQFCNDPFLGVYYHKNNKSWMESEFRVYSSANNCTFEYVSQPFLMDLEGKQGNFKNLREFVFKNIDGYFKIYSKHTPINLVRDLPQGFSALEPLVDLPIGINITRFQTLLALHRSYLTPGDSSSGWTAGAAAYYVGYLQPRTFLLKYNENGTITDAVDCALDPLSETKCTLKSFTVEKGIYQTSNFRVQPTESIVRFPNITNLCPFGEVFNATRFASVYAWNRKRISNCVADYSVLYNSASFSTFKCYGVSPTKLNDLCFTNVYADSFVIRGDEVRQIAPGQTGKIADYNYKLPDDFTGCVIAWNSNNLDSKVGGNYNYLYRLFRKSNLKPFERDISTEIYQAGSTPCNGVEGFNCYFPLQSYGFQPTNGVGYQPYRVVVLSFELLHAPATVCGPKKSTNLVKNKCVNFNFNGLTGTGVLTESNKKFLPFQQFGRDIADTTDAVRDPQTLEILDITPCSFGGVSVITPGTNTSNQVAVLYQDVNCTEVPVAIHADQLTPTWRVYSTGSNVFQTRAGCLIGAEHVNNSYECDIPIGAGICASYQTQTNSPGSASSVASQSIIAYTMSLGAENSVAYSNNSIAIPTNFTISVTTEILPVSMTKTSVDCTMYICGDSTECSNLLLQYGSFCTQLNRALTGIAVEQDKNTQEVFAQVKQIYKTPPIKDFGGFNFSQILPDPSKPSKRSFIEDLLFNKVTLADAGFIKQYGDCLGDIAARDLICAQKFNGLTVLPPLLTDEMIAQYTSALLAGTITSGWTFGAGAALQIPFAMQMAYRFNGIGVTQNVLYENQKLIANQFNSAIGKIQDSLSSTASALGKLQDVVNQNAQALNTLVKQLSSNFGAISSVLNDILSRLDPPEAEVQIDRLITGRLQSLQTYVTQQLIRAAEIRASANLAATKMSECVLGQSKRVDFCGKGYHLMSFPQSAPHGVVFLHVTYVPAQEKNFTTAPAICHDGKAHFPREGVFVSNGTHWFVTQRNFYEPQIITTDNTFVSGNCDVVIGIVNNTVYDPLQPELDSFKEELDKYFKNHTSPDVDLGDISGINASVVNIQKEIDRLNEVAKNLNESLIDLQELGKYEQYIKWPWYIWLGFIAGLIAIVMVTIMLCCMTSCCSCLKGCCSCGSCCKFDEDDSEPVLKGVKLHYT

SEQ ID NO: 110 - protein, 1260 aa, synthetic construct
  REGION 1..1260: note = Recombinant CoV S polypeptide
QCVNLTTRTQLPPAYTNSFTRGVYYPDKVFRSSVLHSTQDLFLPFFSNVTWFHAIHVSGTNGTKRFDNPVLPFNDGVYFASTEKSNIIRGWIFGTTLDSKTQSLLIVNNATNVVIKVCEFQFCNDPFLGVYYHKNNKSWMESEFRVYSSANNCTFEYVSQPFLMDLEGKQGNFKNLREFVFKNIDGYFKIYSKHTPINLVRDLPQGFSALEPLVDLPIGINITRFQTLLALHRSYLTPGDSSSGWTAGAAAYYVGYLQPRTFLLKYNENGTITDAVDCALDPLSETKCTLKSFTVEKGIYQTSNFRVQPTESIVRFPNITNLCPFGEVFNATRFASVYAWNRKRISNCVADYSVLYNSASFSTFKCYGVSPTKLNDLCFTNVYADSFVIRGDEVRQIAPGQTGKIADYNYKLPDDFTGCVIAWNSNNLDSKVGGNYNYLYRLFRKSNLKPFERDISTEIYQAGSTPCNGVEGFNCYFPLQSYGFQPTNGVGYQPYRVVVLSFELLHAPATVCGPKKSTNLVKNKCVNFNFNGLTGTGVLTESNKKFLPFQQFGRDIADTTDAVRDPQTLEILDITPCSFGGVSVITPGTNTSNQVAVLYQDVNCTEVPVAIHADQLTPTWRVYSTGSNVFQTRAGCLIGAEHVNNSYECDIPIGAGICASYQTQTNSPGSASSVASQSIIAYTMSLGAENSVAYSNNSIAIPTNFTISVTTEILPVSMTKTSVDCTMYICGDSTECSNLLLQYGSFCTQLNRALTGIAVEQDKNTQEVFAQVKQIYKTPPIKDFGGFNFSQILPDPSKPSKRSFIEDLLFNKVTLADAGFIKQYGDCLGDIAARDLICAQKFNGLTVLPPLLTDEMIAQYTSALLAGTITSGWTFGAGAALQIPFAMQMAYRFNGIGVTQNVLYENQKLIANQFNSAIGKIQDSLSSTASALGKLQDVVNQNAQALNTLVKQLSSNFGAISSVLNDILSRLDPPEAEVQIDRLITGRLQSLQTYVTQQLIRAAEIRASANLAATKMSECVLGQSKRVDFCGKGYHLMSFPQSAPHGVVFLHVTYVPAQEKNFTTAPAICHDGKAHFPREGVFVSNGTHWFVTQRNFYEPQIITTDNTFVSGNCDVVIGIVNNTVYDPLQPELDSFKEELDKYFKNHTSPDVDLGDISGINASVVNIQKEIDRLNEVAKNLNESLIDLQELGKYEQYIKWPWYIWLGFIAGLIAIVMVTIMLCCMTSCCSCLKGCCSCGSCCKFDEDDSEPVLKGVKLHYT

SEQ ID NO: 111 - protein, 4 aa, synthetic construct
  REGION 1..4: note = Recombinant Furin Cleavage Site
GSGA

SEQ ID NO: 112 - protein, 1260 aa, synthetic construct
  REGION 1..1260: note = Recombinant SARS-CoV-2 spike protein
QCVNLTTRTQLPPAYTNSFTRGVYYPDKVFRSSVLHSTQDLFLPFFSNVTWFHAIHVSGTNGTKRFDNPVLPFNDGVYFASTEKSNIIRGWIFGTTLDSKTQSLLIVNNATNVVIKVCEFQFCNDPFLGVYYHKNNKSWMESEFRVYSSANNCTFEYVSQPFLMDLEGKQGNFKNLREFVFKNIDGYFKIYSKHTPINLVRDLPQGFSALEPLVDLPIGINITRFQTLLALHRSYLTPGDSSSGWTAGAAAYYVGYLQPRTFLLKYNENGTITDAVDCALDPLSETKCTLKSFTVEKGIYQTSNFRVQPTESIVRFPNITNLCPFGEVFNATRFASVYAWNRKRISNCVADYSVLYNSASFSTFKCYGVSPTKLNDLCFTNVYADSFVIRGDEVRQIAPGQTGKIADYNYKLPDDFTGCVIAWNSNNLDSKVGGNYNYLYRLFRKSNLKPFERDISTEIYQAGSTPCNGVEGFNCYFPLQSYGFQPTYGVGYQPYRVVVLSFELLHAPATVCGPKKSTNLVKNKCVNFNFNGLTGTGVLTESNKKFLPFQQFGRDIADTTDAVRDPQTLEILDITPCSFGGVSVITPGTNTSNQVAVLYQDVNCTEVPVAIHADQLTPTWRVYSTGSNVFQTRAGCLIGAEHVNNSYECDIPIGAGICASYQTQTNSPQQAQSVASQSIIAYTMSLGAENSVAYSNNSIAIPTNFTISVTTEILPVSMTKTSVDCTMYICGDSTECSNLLLQYGSFCTQLNRALTGIAVEQDKNTQEVFAQVKQIYKTPPIKDFGGFNFSQILPDPSKPSKRSFIEDLLFNKVTLADAGFIKQYGDCLGDIAARDLICAQKFNGLTVLPPLLTDEMIAQYTSALLAGTITSGWTFGAGAALQIPFAMQMAYRFNGIGVTQNVLYENQKLIANQFNSAIGKIQDSLSSTASALGKLQDVVNQNAQALNTLVKQLSSNFGAISSVLNDILSRLDPPEAEVQIDRLITGRLQSLQTYVTQQLIRAAEIRASANLAATKMSECVLGQSKRVDFCGKGYHLMSFPQSAPHGVVFLHVTYVPAQEKNFTTAPAICHDGKAHFPREGVFVSNGTHWFVTQRNFYEPQIITTDNTFVSGNCDVVIGIVNNTVYDPLQPELDSFKEELDKYFKNHTSPDVDLGDISGINASVVNIQKEIDRLNEVAKNLNESLIDLQELGKYEQYIKWPWYIWLGFIAGLIAIVMVTIMLCCMTSCCSCLKGCCSCGSCCKFDEDDSEPVLKGVKLHYT

SEQ ID NO: 113 - protein, 1260 aa, synthetic construct
  REGION 1..1260: note = Recombinant SARS-CoV-2 spike protein
QCVNLTTRTQLPPAYTNSFTRGVYYPDKVFRSSVLHSTQDLFLPFFSNVTWFHAIHVSGTNGTKRFDNPVLPFNDGVYFASTEKSNIIRGWIFGTTLDSKTQSLLIVNNATNVVIKVCEFQFCNDPFLGVYYHKNNKSWMESEFRVYSSANNCTFEYVSQPFLMDLEGKQGNFKNLREFVFKNIDGYFKIYSKHTPINLVRDLPQGFSALEPLVDLPIGINITRFQTLLALHRSYLTPGDSSSGWTAGAAAYYVGYLQPRTFLLKYNENGTITDAVDCALDPLSETKCTLKSFTVEKGIYQTSNFRVQPTESIVRFPNITNLCPFGEVFNATRFASVYAWNRKRISNCVADYSVLYNSASFSTFKCYGVSPTKLNDLCFTNVYADSFVIRGDEVRQIAPGQTGKIADYNYKLPDDFTGCVIAWNSNNLDSKVGGNYNYLYRLFRKSNLKPFERDISTEIYQAGSTPCNGVEGFNCYFPLQSYGFQPTYGVGYQPYRVVVLSFELLHAPATVCGPKKSTNLVKNKCVNFNFNGLTGTGVLTESNKKFLPFQQFGRDIADTTDAVRDPQTLEILDITPCSFGGVSVITPGTNTSNQVAVLYQGVNCTEVPVAIHADQLTPTWRVYSTGSNVFQTRAGCLIGAEHVNNSYECDIPIGAGICASYQTQTNSPQQAQSVASQSIIAYTMSLGAENSVAYSNNSIAIPTNFTISVTTEILPVSMTKTSVDCTMYICGDSTECSNLLLQYGSFCTQLNRALTGIAVEQDKNTQEVFAQVKQIYKTPPIKDFGGFNFSQILPDPSKPSKRSFIEDLLFNKVTLADAGFIKQYGDCLGDIAARDLICAQKFNGLTVLPPLLTDEMIAQYTSALLAGTITSGWTFGAGAALQIPFAMQMAYRFNGIGVTQNVLYENQKLIANQFNSAIGKIQDSLSSTASALGKLQDVVNQNAQALNTLVKQLSSNFGAISSVLNDILSRLDPPEAEVQIDRLITGRLQSLQTYVTQQLIRAAEIRASANLAATKMSECVLGQSKRVDFCGKGYHLMSFPQSAPHGVVFLHVTYVPAQEKNFTTAPAICHDGKAHFPREGVFVSNGTHWFVTQRNFYEPQIITTDNTFVSGNCDVVIGIVNNTVYDPLQPELDSFKEELDKYFKNHTSPDVDLGDISGINASVVNIQKEIDRLNEVAKNLNESLIDLQELGKYEQYIKWPWYIWLGFIAGLIAIVMVTIMLCCMTSCCSCLKGCCSCGSCCKFDEDDSEPVLKGVKLHYT

SEQ ID NO: 114 - protein, 1257 aa, synthetic construct
  REGION 1..1257: note = Recombinant SARS-CoV-2 spike protein
QCVNLTTRTQLPPAYTNSFTRGVYYPDKVFRSSVLHSTQDLFLPFFSNVTWFHAISGTNGTKRFDNPVLPFNDGVYFASTEKSNIIRGWIFGTTLDSKTQSLLIVNNATNVVIKVCEFQFCNDPFLGVYHKNNKSWMESEFRVYSSANNCTFEYVSQPFLMDLEGKQGNFKNLREFVFKNIDGYFKIYSKHTPINLVRDLPQGFSALEPLVDLPIGINITRFQTLLALHRSYLTPGDSSSGWTAGAAAYYVGYLQPRTFLLKYNENGTITDAVDCALDPLSETKCTLKSFTVEKGIYQTSNFRVQPTESIVRFPNITNLCPFGEVFNATRFASVYAWNRKRISNCVADYSVLYNSASFSTFKCYGVSPTKLNDLCFTNVYADSFVIRGDEVRQIAPGQTGKIADYNYKLPDDFTGCVIAWNSNNLDSKVGGNYNYLYRLFRKSNLKPFERDISTEIYQAGSTPCNGVEGFNCYFPLQSYGFQPTYGVGYQPYRVVVLSFELLHAPATVCGPKKSTNLVKNKCVNFNFNGLTGTGVLTESNKKFLPFQQFGRDIDDTTDAVRDPQTLEILDITPCSFGGVSVITPGTNTSNQVAVLYQGVNCTEVPVAIHADQLTPTWRVYSTGSNVFQTRAGCLIGAEHVNNSYECDIPIGAGICASYQTQTNSHQQAQSVASQSIIAYTMSLGAENSVAYSNNSIAIPINFTISVTTEILPVSMTKTSVDCTMYICGDSTECSNLLLQYGSFCTQLNRALTGIAVEQDKNTQEVFAQVKQIYKTPPIKDFGGFNFSQILPDPSKPSKRSFIEDLLFNKVTLADAGFIKQYGDCLGDIAARDLICAQKFNGLTVLPPLLTDEMIAQYTSALLAGTITSGWTFGAGAALQIPFAMQMAYRFNGIGVTQNVLYENQKLIANQFNSAIGKIQDSLSSTASALGKLQDVVNQNAQALNTLVKQLSSNFGAISSVLNDILARLDPPEAEVQIDRLITGRLQSLQTYVTQQLIRAAEIRASANLAATKMSECVLGQSKRVDFCGKGYHLMSFPQSAPHGVVFLHVTYVPAQEKNFTTAPAICHDGKAHFPREGVFVSNGTHWFVTQRNFYEPQIITTHNTFVSGNCDVVIGIVNNTVYDPLQPELDSFKEELDKYFKNHTSPDVDLGDISGINASVVNIQKEIDRLNEVAKNLNESLIDLQELGKYEQYIKWPWYIWLGFIAGLIAIVMVTIMLCCMTSCCSCLKGCCSCGSCCKFDEDDSEPVLKGVKLHYT

SEQ ID NO: 115 - protein, 1260 aa, synthetic construct
  REGION 1..1260: note = Recombinant SARS-CoV-2 spike protein
QCVNLTTRTQLPPAYTNSFTRGVYYPDKVFRSSVLHSTQDLFLPFFSNVTWFHAIHVSGTNGTKRFANPVLPFNDGVYFASTEKSNIIRGWIFGTTLDSKTQSLLIVNNATNVVIKVCEFQFCNDPFLGVYYHKNNKSWMESEFRVYSSANNCTFEYVSQPFLMDLEGKQGNFKNLREFVFKNIDGYFKIYSKHTPINLVRGLPQGFSALEPLVDLPIGINITRFQTLHALHRSYLTPGDSSSGWTAGAAAYYVGYLQPRTFLLKYNENGTITDAVDCALDPLSETKCTLKSFTVEKGIYQTSNFRVQPTESIVRFPNITNLCPFGEVFNATRFASVYAWNRKRISNCVADYSVLYNSASFSTFKCYGVSPTKLNDLCFTNVYADSFVIRGDEVRQIAPGQTGNIADYNYKLPDDFTGCVIAWNSNNLDSKVGGNYNYLYRLFRKSNLKPFERDISTEIYQAGSTPCNGVKGFNCYFPLQSYGFQPTYGVGYQPYRVVVLSFELLHAPATVCGPKKSTNLVKNKCVNFNFNGLTGTGVLTESNKKFLPFQQFGRDIADTTDAVRDPQTLEILDITPCSFGGVSVITPGTNTSNQVAVLYQGVNCTEVPVAIHADQLTPTWRVYSTGSNVFQTRAGCLIGAEHVNNSYECDIPIGAGICASYQTQTNSPQQAQSVASQSIIAYTMSLGVENSVAYSNNSIAIPTNFTISVTTEILPVSMTKTSVDCTMYICGDSTECSNLLLQYGSFCTQLNRALTGIAVEQDKNTQEVFAQVKQIYKTPPIKDFGGFNFSQILPDPSKPSKRSFIEDLLFNKVTLADAGFIKQYGDCLGDIAARDLICAQKFNGLTVLPPLLTDEMIAQYTSALLAGTITSGWTFGAGAALQIPFAMQMAYRFNGIGVTQNVLYENQKLIANQFNSAIGKIQDSLSSTASALGKLQDVVNQNAQALNTLVKQLSSNFGAISSVLNDILSRLDPPEAEVQIDRLITGRLQSLQTYVTQQLIRAAEIRASANLAATKMSECVLGQSKRVDFCGKGYHLMSFPQSAPHGVVFLHVTYVPAQEKNFTTAPAICHDGKAHFPREGVFVSNGTHWFVTQRNFYEPQIITTDNTFVSGNCDVVIGIVNNTVYDPLQPELDSFKEELDKYFKNHTSPDVDLGDISGINASVVNIQKEIDRLNEVAKNLNESLIDLQELGKYEQYIKWPWYIWLGFIAGLIAIVMVTIMLCCMTSCCSCLKGCCSCGSCCKFDEDDSEPVLKGVKLHYT

SEQ ID NO: 116 - protein, 196 aa, Severe acute respiratory syndrome-related coronavirus
LCPFGEVFNATRFASVYAWNRKRISNCVADYSVLYNSASFSTFKCYGVSPTKLNDLCFTNVYADSFVIRGDEVRQIAPGQTGKIADYNYKLPDDFTGCVIAWNSNNLDSKVGGNYNYLYRLFRKSNLKPFERDISTEIYQAGSTPCNGVEGFNCYFPLQSYGFQPTNGVGYQPYRVVVLSFELLHAPATVCGPKKS

SEQ ID NO: 117 - protein, 13 aa, synthetic construct
  REGION 1..13: note = signal peptide
MFVFLVLLPLVSI

SEQ ID NO: 118 - protein, 292 aa, Severe acute respiratory syndrome-related coronavirus
QCVNLTTRTQLPPAYTNSFTRGVYYPDKVFRSSVLHSTQDLFLPFFSNVTWFHAIHVSGTNGTKRFDNPVLPFNDGVYFASTEKSNIIRGWIFGTTLDSKTQSLLIVNNATNVVIKVCEFQFCNDPFLGVYYHKNNKSWMESEFRVYSSANNCTFEYVSQPFLMDLEGKQGNFKNLREFVFKNIDGYFKIYSKHTPINLVRDLPQGFSALEPLVDLPIGINITRFQTLLALHRSYLTPGDSSSGWTAGAAAYYVGYLQPRTFLLKYNENGTITDAVDCALDPLSETKCTLKS

SEQ ID NO: 119 - protein, 83 aa, Severe acute respiratory syndrome-related coronavirus
MAYRFNGIGVTQNVLYENQKLIANQFNSAIGKIQDSLSSTASALGKLQDVVNQNAQALNTLVKQLSSNFGAISSVLNDILSRL

SEQ ID NO: 120 - protein, 588 aa, Severe acute respiratory syndrome-related coronavirus
SVASQSIIAYTMSLGAENSVAYSNNSIAIPTNFTISVTTEILPVSMTKTSVDCTMYICGDSTECSNLLLQYGSFCTQLNRALTGIAVEQDKNTQEVFAQVKQIYKTPPIKDFGGFNFSQILPDPSKPSKRSFIEDLLFNKVTLADAGFIKQYGDCLGDIAARDLICAQKFNGLTVLPPLLTDEMIAQYTSALLAGTITSGWTFGAGAALQIPFAMQMAYRFNGIGVTQNVLYENQKLIANQFNSAIGKIQDSLSSTASALGKLQDVVNQNAQALNTLVKQLSSNFGAISSVLNDILSRLDKVEAEVQIDRLITGRLQSLQTYVTQQLIRAAEIRASANLAATKMSECVLGQSKRVDFCGKGYHLMSFPQSAPHGVVFLHVTYVPAQEKNFTTAPAICHDGKAHFPREGVFVSNGTHWFVTQRNFYEPQIITTDNTFVSGNCDVVIGIVNNTVYDPLQPELDSFKEELDKYFKNHTSPDVDLGDISGINASVVNIQKEIDRLNEVAKNLNESLIDLQELGKYEQYIKWPWYIWLGFIAGLIAIVMVTIMLCCMTSCCSCLKGCCSCGSCCKFDEDDSEPVLKGVKLHYT

SEQ ID NO: 121 - protein, 672 aa, Severe acute respiratory syndrome-related coronavirus
QCVNLTTRTQLPPAYTNSFTRGVYYPDKVFRSSVLHSTQDLFLPFFSNVTWFHAIHVSGTNGTKRFDNPVLPFNDGVYFASTEKSNIIRGWIFGTTLDSKTQSLLIVNNATNVVIKVCEFQFCNDPFLGVYYHKNNKSWMESEFRVYSSANNCTFEYVSQPFLMDLEGKQGNFKNLREFVFKNIDGYFKIYSKHTPINLVRDLPQGFSALEPLVDLPIGINITRFQTLLALHRSYLTPGDSSSGWTAGAAAYYVGYLQPRTFLLKYNENGTITDAVDCALDPLSETKCTLKSFTVEKGIYQTSNFRVQPTESIVRFPNITNLCPFGEVFNATRFASVYAWNRKRISNCVADYSVLYNSASFSTFKCYGVSPTKLNDLCFTNVYADSFVIRGDEVRQIAPGQTGKIADYNYKLPDDFTGCVIAWNSNNLDSKVGGNYNYLYRLFRKSNLKPFERDISTEIYQAGSTPCNGVEGFNCYFPLQSYGFQPTNGVGYQPYRVVVLSFELLHAPATVCGPKKSTNLVKNKCVNFNFNGLTGTGVLTESNKKFLPFQQFGRDIADTTDAVRDPQTLEILDITPCSFGGVSVITPGTNTSNQVAVLYQDVNCTEVPVAIHADQLTPTWRVYSTGSNVFQTRAGCLIGAEHVNNSYECDIPIGAGICASYQTQTNSPRRAR

SEQ ID NO: 122 - protein, 140 aa, Severe acute respiratory syndrome-related coronavirus
NFNGLTGTGVLTESNKKFLPFQQFGRDIADTTDAVRDPQTLEILDITPCSFGGVSVITPGTNTSNQVAVLYQDVNCTEVPVAIHADQLTPTWRVYSTGSNVFQTRAGCLIGAEHVNNSYECDIPIGAGICASYQTQTNSP

SEQ ID NO: 123 - protein, 24 aa, Severe acute respiratory syndrome-related coronavirus
WYIWLGFIAGLIAIVMVTIMLCCM

SEQ ID NO: 124 - protein, 36 aa, Severe acute respiratory syndrome-related coronavirus
TSCCSCLKGCCSCGSCCKFDEDDSEPVLKGVKLHYT

SEQ ID NO: 125 - protein, 51 aa, Severe acute respiratory syndrome-related coronavirus
DVDLGDISGINASVVNIQKEIDRLNEVAKNLNESLIDLQELGKYEQYIKWP

SEQ ID NO: 126 - protein, 197 aa, Severe acute respiratory syndrome-related coronavirus
NITNLCPFGEVFNATRFASVYAWNRKRISNCVADYSVLYNSASFSTFKCYGVSPTKLNDLCFTNVYADSFVIRGDEVRQIAPGQTGKIADYNYKLPDDFTGCVIAWNSNNLDSKVGGNYNYLYRLFRKSNLKPFERDISTEIYQAGSTPCNGVEGFNCYFPLQSYGFQPTNGVGYQPYRVVVLSFELLHAPATVCGP

SEQ ID NO: 127 - skipped

SEQ ID NO: 128 - protein, 4 aa, synthetic construct
  REGION 1..4: note = inactivated furin cleavage site
GGGG

SEQ ID NO: 129 - protein, 5 aa, synthetic construct
  REGION 1..5: note = inactivated furin cleavage site
GGGGG

SEQ ID NO: 130 - protein, 1272 aa, synthetic construct
  REGION 1..1272: note = modified coronavirus S polypeptide
MFVFLVLLPLVSSQCVNLTTRTQLPPAYTNSFTRGVYYPDKVFRSSVLHSTQDLFLPFFSNVTWFHAIHVSGTNGTKRFANPVLPFNDGVYFASTEKSNIIRGWIFGTTLDSKTQSLLIVNNATNVVIKVCEFQFCNDPFLGVYYHKNNKSWMESEFRVYSSANNCTFEYVSQPFLMDLEGKQGNFKNLREFVFKNIDGYFKIYSKHTPINLVRGLPQGFSALEPLVDLPIGINITRFQTLHALHRSYLTPGDSSSGWTAGAAAYYVGYLQPRTFLLKYNENGTITDAVDCALDPLSETKCTLKSFTVEKGIYQTSNFRVQPTESIVRFPNITNLCPFGEVFNATRFASVYAWNRKRISNCVADYSVLYNSASFSTFKCYGVSPTKLNDLCFTNVYADSFVIRGDEVRQIAPGQTGNIADYNYKLPDDFTGCVIAWNSNNLDSKVGGNYNYLYRLFRKSNLKPFERDISTEIYQAGSTPCNGVKGFNCYFPLQSYGFQPTYGVGYQPYRVVVLSFELLHAPATVCGPKKSTNLVKNKCVNFNFNGLTGTGVLTESNKKFLPFQQFGRDIADTTDAVRDPQTLEILDITPCSFGGVSVITPGTNTSNQVAVLYQGVNCTEVPVAIHADQLTPTWRVYSTGSNVFQTRAGCLIGAEHVNNSYECDIPIGAGICASYQTQTNSPQQAQSVASQSIIAYTMSLGVENSVAYSNNSIAIPTNFTISVTTEILPVSMTKTSVDCTMYICGDSTECSNLLLQYGSFCTQLNRALTGIAVEQDKNTQEVFAQVKQIYKTPPIKDFGGNFSQILPDPSKPSKRSFIEDLLFNKVTLADAGFIKQYGDCLGDIAARDLICAQKFNGLTVLPPLLTDEMIAQYTSALLAGTITSGWTFGAGAALQIPFAMQMAYRFNGIGVTQNVLYENQKLIANQFNSAIGKIQDSLSSTASALGKLQDVVNQNAQALNTLVKQLSSNFGAISSVLNDILSRLDPPEAEVQIDRLITGRLQSLQTYVTQQLIRAAEIRASANLAATKMSECVLGQSKRVDFCGKGYHLMSFPQSAPHGVVFLHVTYVPAQEKNFTTAPAICHDGKAHFPREGVFVSNGTHWFVTQRNFYEPQIITTDNTFVSGNCDVVIGIVNNTVYDPLQPELDSFKEELDKYFKNHTSPDVDLGDISGINASVVNIQKEIDRLNEVAKNLNESLIDLQELGKYEQYIKWPWYIWLGFIAGLIAIVMVTIMLCCMTSCCSCLKGCCSCGSCCKFDEDDSEPVLKGVKLHYT

SEQ ID NO: 131 - DNA, 3822 bp, synthetic construct
  misc_feature 1..3822: note = modified coronavirus S polypeptide
  source 1..3822: mol_type = other DNA
atgttcgtcttcctggtgctgctgcctctggtgtccagccagtgcgtgaacctgaccactaggactcagctgcctcccgcttacaccaactcattcactaggggtgtgtactacccagacaaggtcttccgctcctcagtgctgcactcaactcaggacctgttcctgcctttcttctccaacgtcacctggttccacgctatccacgtgtccggcaccaacggcactaagaggttcgccaaccccgtgctgccattcaacgacggagtctacttcgcttcaaccgagaagtccaacatcatcagaggatggatcttcggcaccactctggacagcaagactcagtctctgctgatcgtcaacaacgctaccaacgtggtcatcaaggtgtgcgaattccagttctgtaacgaccccttcctgggtgtctactaccacaagaacaacaagtcatggatggagtccgaattccgcgtctactccagcgctaacaactgcactttcgagtacgtgtcccagccattcctgatggacctggaaggaaagcagggtaacttcaagaacctgcgcgagttcgtgttcaagaacatcgacggctacttcaagatttacagcaagcacacccccatcaacctggtccgtggcctgccacagggattctctgctctggagcccctggtggacctgccaatcggcatcaacatcaccaggttccagactctgcacgccctgcacagatcctacctgactcccggagactcttcatccggttggaccgctggcgctgccgcttactacgtgggttacctgcagccacgcaccttcctgctgaagtacaacgaaaacggcaccatcactgacgccgtcgactgcgctctggacccactgtcagaaaccaagtgcactctgaagtccttcaccgtggagaagggaatctaccagacttcaaacttccgcgtgcagcctaccgaatccatcgtccgtttcccaaacatcactaacctgtgccctttcggagaggtcttcaacgccacccgcttcgcttccgtgtacgcctggaaccgcaagcgtatctcaaactgcgtcgctgactactccgtgctgtacaactcagcctccttcagcaccttcaagtgctacggagtgtcacccactaagctgaacgacctgtgcttcaccaacgtctacgctgactccttcgtgatccgcggtgacgaggtccgtcagatcgctccaggccagactggaaacatcgccgactacaactacaagctgcctgacgacttcaccggttgcgtcatcgcctggaacagcaacaacctggactctaaagtgggtggcaactacaactacctgtacaggctgttcagaaagtcaaacctgaagcccttcgagcgcgacatcagcactgaaatctaccaggctggttctaccccatgcaacggtgtcaagggcttcaactgctacttccctctgcagtcctacggcttccagcccacttacggtgtgggctaccagccataccgtgtggtcgtgctgagcttcgagctgctgcacgcccctgctactgtgtgcggacccaagaagtctaccaacctggtcaagaacaagtgcgtgaacttcaacttcaacggtctgaccggaactggtgtcctgaccgagagcaacaagaagttcctgcctttccagcagttcggtcgcgacatcgctgacaccactgacgccgtgcgtgaccctcagaccctggaaatcctggacatcactccctgctcattcggaggtgtctccgtgatcactcccggaaccaacacttctaaccaggtcgctgtgctgtaccagggtgtgaactgcaccgaagtcccagtggccatccacgctgaccagctgacccctacttggagggtgtactccaccggcagcaacgtcttccagactagagctggatgcctgatcggtgccgagcacgtcaacaacagctacgaatgcgacatccctatcggcgctggaatctgcgcctcttaccagacccagactaacagcccccagcaggctcagtctgtggcctctcagtcaatcatcgcctacaccatgtcactgggtgtcgaaaactccgtggcttactctaacaactcaatcgccatccctaccaacttcactatcagcgtgaccactgagatcctgcccgtcagcatgaccaagacttctgtggactgcactatgtacatctgcggcgacagcaccgaatgctctaacctgctgctgcagtacggttctttctgcacccagctgaaccgcgctctgactggcatcgccgtggagcaggacaagaacactcaggaagtcttcgctcaggtgaagcaaatctacaagaccccacctatcaaggacttcggcggattcaacttctcccagatcctgccagacccttccaagcccagcaagaggtctttcatcgaggacctgctgttcaacaaggtcactctggccgacgctggtttcatcaagcagtacggcgactgcctgggagacatcgctgctcgcgacctgatctgcgcccagaagttcaacggcctgaccgtgctgcccccactgctgactgacgaaatgatcgctcagtacactagcgccctgctggctggcaccatcacttcaggttggactttcggtgctggtgctgctctgcagatcccattcgctatgcagatggcctaccgtttcaacggaatcggtgtcacccagaacgtgctgtacgagaaccagaagctgatcgctaaccagttcaactcagccatcggcaagatccaggacagcctgagctctactgcctctgctctgggaaagctgcaggacgtcgtgaaccagaacgcccaggctctgaacaccctggtcaagcagctgtcatccaacttcggcgccatcagctctgtgctgaacgacatcctgtccaggctggaccctcccgaggctgaagtccagatcgacaggctgatcactggaagactgcagtcactgcagacctacgtgactcagcagctgatccgcgccgctgaaatccgtgcctccgctaacctggccgctaccaagatgagcgagtgcgtcctgggccagtctaagagagtggacttctgcggcaagggataccacctgatgtcattcccacagtccgcccctcacggagtcgtgttcctgcacgtcacctacgtgcccgctcaggagaagaacttcaccactgccccagctatctgccacgacggcaaggctcacttccctcgcgaaggagtcttcgtgagcaacggcacccactggttcgtcactcagcgtaacttctacgagccccagatcatcaccactgacaacactttcgtgtctggcaactgcgacgtggtcatcggtatcgtcaacaacaccgtgtacgaccctctgcagcccgagctggactcattcaaggaagagctggacaagtacttcaagaaccacacctcccctgacgtcgacctgggtgacatctcaggcatcaacgcctccgtcgtgaacatccagaaggagatcgaccgcctgaacgaagtggctaagaacctgaacgaaagcctgatcgacctgcaggagctgggcaagtacgaacagtacatcaagtggccatggtacatctggctgggattcatcgctggcctcatcgctatcgtgatggtgaccatcatgctgtgctgcatgacttcatgctgctcctgcctgaagggttgctgcagctgcggctcttgctgcaagttcgacgaggacgactctgaacctgtcctgaagggagtgaagctgcactacacctaa

SEQ ID NO: 132 - protein, 1259 aa, synthetic construct
  REGION 1..1259: note = modified coronavirus S polypeptide
QCVNLTTRTQLPPAYTNSFTRGVYYPDKVFRSSVLHSTQDLFLPFFSNVTWFHAIHVSGTNGTKRFANPVLPFNDGVYFASTEKSNIIRGWIFGTTLDSKTQSLLIVNNATNVVIKVCEFQFCNDPFLGVYYHKNNKSWMESEFRVYSSANNCTFEYVSQPFLMDLEGKQGNFKNLREFVFKNIDGYFKIYSKHTPINLVRGLPQGFSALEPLVDLPIGINITRFQTLHALHRSYLTPGDSSSGWTAGAAAYYVGYLQPRTFLLKYNENGTITDAVDCALDPLSETKCTLKSFTVEKGIYQTSNFRVQPTESIVRFPNITNLCPFGEVFNATRFASVYAWNRKRISNCVADYSVLYNSASFSTFKCYGVSPTKLNDLCFTNVYADSFVIRGDEVRQIAPGQTGNIADYNYKLPDDFTGCVIAWNSNNLDSKVGGNYNYLYRLFRKSNLKPFERDISTEIYQAGSTPCNGVKGFNCYFPLQSYGFQPTYGVGYQPYRVVVLSFELLHAPATVCGPKKSTNLVKNKCVNFNFNGLTGTGVLTESNKKFLPFQQFGRDIADTTDAVRDPQTLEILDITPCSFGGVSVITPGTNTSNQVAVLYQGVNCTEVPVAIHADQLTPTWRVYSTGSNVFQTRAGCLIGAEHVNNSYECDIPIGAGICASYQTQTNSPQQAQSVASQSIIAYTMSLGVENSVAYSNNSIAIPTNFTISVTTEILPVSMTKTSVDCTMYICGDSTECSNLLLQYGSFCTQLNRALTGIAVEQDKNTQEVFAQVKQIYKTPPIKDFGGNFSQILPDPSKPSKRSFIEDLLFNKVTLADAGFIKQYGDCLGDIAARDLICAQKFNGLTVLPPLLTDEMIAQYTSALLAGTITSGWTFGAGAALQIPFAMQMAYRFNGIGVTQNVLYENQKLIANQFNSAIGKIQDSLSSTASALGKLQDVVNQNAQALNTLVKQLSSNFGAISSVLNDILSRLDPPEAEVQIDRLITGRLQSLQTYVTQQLIRAAEIRASANLAATKMSECVLGQSKRVDFCGKGYHLMSFPQSAPHGVVFLHVTYVPAQEKNFTTAPAICHDGKAHFPREGVFVSNGTHWFVTQRNFYEPQIITTDNTFVSGNCDVVIGIVNNTVYDPLQPELDSFKEELDKYFKNHTSPDVDLGDISGINASVVNIQKEIDRLNEVAKNLNESLIDLQELGKYEQYIKWPWYIWLGFIAGLIAIVMVTIMLCCMTSCCSCLKGCCSCGSCCKFDEDDSEPVLKGVKLHYT

SEQ ID NO: 133 - protein, 1258 aa, synthetic construct
  REGION 1..1258: note = modified coronavirus S polypeptide
QCVNLTTRTQLPPAYTNSFTRGVYYPDKVFRSSVLHSTQDLFLPFFSNVTWFHAIHVSGTNGTKRFDNPVLPFNDGVYFASTEKSNIIRGWIFGTTLDSKTQSLLIVNNATNVVIKVCEFQFCNDPFLGVYYHKNNKSWMESEFRVYSSANNCTFEYVSQPFLMDLEGKQGNFKNLREFVFKNIDGYFKIYSKHTPINLVRDLPQGFSALEPLVDLPIGINITRFQTLLALHRSYLTPGDSSSGWTAGAAAYYVGYLQPRTFLLKYNENGTITDAVDCALDPLSETKCTLKSFTVEKGIYQTSNFRVQPTESIVRFPNITNLCPFGEVFNATRFASVYAWNRKRISNCVADYSVLYNSASFSTFKCYGVSPTKLNDLCFTNVYADSFVIRGDEVRQIAPGQTGKIADYNYKLPDDFTGCVIAWNSNNLDSKVGGNYNYLYRLFRKSNLKPFERDISTEIYQAGSTPCNGVEGFNCYFPLQSYGFQPTNGVGYQPYRVVVLSFELLHAPATVCGPKKSTNLVKNKCVNFNFNGLTGTGVLTESNKKFLPFQQFGRDIADTTDAVRDPQTLEILDITPCSFGGVSVITPGTNTSNQVAVLYQGVNCTEVPVAIHADQLTPTWRVYSTGSNVFQTRAGCLIGAEHVNNSYECDIPIGAGICASYQTQTNSPGGSVASQSIIAYTMSLGAENSVAYSNNSIAIPTNFTISVTTEILPVSMTKTSVDCTMYICGDSTECSNLLLQYGSFCTQLNRALTGIAVEQDKNTQEVFAQVKQIYKTPPIKDFGGFNFSQILPDPSKPSKRSFIEDLLFNKVTLADAGFIKQYGDCLGDIAARDLICAQKFNGLTVLPPLLTDEMIAQYTSALLAGTITSGWTFGAGAALQIPFAMQMAYRFNGIGVTQNVLYENQKLIANQFNSAIGKIQDSLSSTASALGKLQDVVNQNAQALNTLVKQLSSNFGAISSVLNDILSRLDPPEAEVQIDRLITGRLQSLQTYVTQQLIRAAEIRASANLAATKMSECVLGQSKRVDFCGKGYHLMSFPQSAPHGVVFLHVTYVPAQEKNFTTAPAICHDGKAHFPREGVFVSNGTHWFVTQRNFYEPQIITTDNTFVSGNCDVVIGIVNNTVYDPLQPELDSFKEELDKYFKNHTSPDVDLGDISGINASVVNIQKEIDRLNEVAKNLNESLIDLQELGKYEQYIKWPWYIWLGFIAGLIAIVMVTIMLCCMTSCCSCLKGCCSCGSCCKFDEDDSEPVLKGVKLHYT

SEQ ID NO: 134 - protein, 1271 aa, synthetic construct
  REGION 1..1271: note = modified coronavirus S polypeptide
MFVFLVLLPLVSSQCVNLTTRTQLPPAYTNSFTRGVYYPDKVFRSSVLHSTQDLFLPFFSNVTWFHAIHVSGTNGTKRFDNPVLPFNDGVYFASTEKSNIIRGWIFGTTLDSKTQSLLIVNNATNVVIKVCEFQFCNDPFLGVYYHKNNKSWMESEFRVYSSANNCTFEYVSQPFLMDLEGKQGNFKNLREFVFKNIDGYFKIYSKHTPINLVRDLPQGFSALEPLVDLPIGINITRFQTLLALHRSYLTPGDSSSGWTAGAAAYYVGYLQPRTFLLKYNENGTITDAVDCALDPLSETKCTLKSFTVEKGIYQTSNFRVQPTESIVRFPNITNLCPFGEVFNATRFASVYAWNRKRISNCVADYSVLYNSASFSTFKCYGVSPTKLNDLCFTNVYADSFVIRGDEVRQIAPGQTGKIADYNYKLPDDFTGCVIAWNSNNLDSKVGGNYNYLYRLFRKSNLKPFERDISTEIYQAGSTPCNGVEGFNCYFPLQSYGFQPTNGVGYQPYRVVVLSFELLHAPATVCGPKKSTNLVKNKCVNFNFNGLTGTGVLTESNKKFLPFQQFGRDIADTTDAVRDPQTLEILDITPCSFGGVSVITPGTNTSNQVAVLYQGVNCTEVPVAIHADQLTPTWRVYSTGSNVFQTRAGCLIGAEHVNNSYECDIPIGAGICASYQTQTNSPGGSVASQSIIAYTMSLGAENSVAYSNNSIAIPTNFTISVTTEILPVSMTKTSVDCTMYICGDSTECSNLLLQYGSFCTQLNRALTGIAVEQDKNTQEVFAQVKQIYKTPPIKDFGGFNFSQILPDPSKPSKRSFIEDLLFNKVTLADAGFIKQYGDCLGDIAARDLICAQKFNGLTVLPPLLTDEMIAQYTSALLAGTITSGWTFGAGAALQIPFAMQMAYRFNGIGVTQNVLYENQKLIANQFNSAIGKIQDSLSSTASALGKLQDVVNQNAQALNTLVKQLSSNFGAISSVLNDILSRLDPPEAEVQIDRLITGRLQSLQTYVTQQLIRAAEIRASANLAATKMSECVLGQSKRVDFCGKGYHLMSFPQSAPHGVVFLHVTYVPAQEKNFTTAPAICHDGKAHFPREGVFVSNGTHWFVTQRNFYEPQIITTDNTFVSGNCDVVIGIVNNTVYDPLQPELDSFKEELDKYFKNHTSPDVDLGDISGINASVVNIQKEIDRLNEVAKNLNESLIDLQELGKYEQYIKWPWYIWLGFIAGLIAIVMVTIMLCCMTSCCSCLKGCCSCGSCCKFDEDDSEPVLKGVKLHYT

SEQ ID NO: 135 - protein, 3813 aa, synthetic construct
  REGION 1..3813: note = modified coronavirus S polypeptide
ATGTTCGTCTTCCTGGTGCTGCTGCCTCTGGTGTCCAGCCAGTGCGTGAACCTGACCACTAGGACTCAGCTGCCTCCCGCTTACACCAACAGCTTCACTAGGGGTGTCTACTACCCTGACAAGGTCTTCCGCTCCTCAGTGCTGCACTCTACTCAGGACCTGTTCCTGCCCTTCTTCTCAAACGTGACCTGGTTCCACGCCATCTCCGGCACCAACGGCACTAAGAGGTTCGACAACCCCGTGCTGCCATTCAACGACGGCGTCTACTTCGCTTCAACCGAGAAGTCCAACATCATCAGAGGATGGATCTTCGGCACCACTCTGGACAGCAAGACTCAGTCTCTGCTGATCGTCAACAACGCCACCAACGTGGTCATCAAGGTGTGCGAATTCCAGTTCTGCAACGACCCATTCCTGGGTGTGTACCACAAGAACAACAAGTCATGGATGGAGTCCGAATTCCGCGTCTACTCCAGCGCTAACAACTGCACTTTCGAGTACGTGAGCCAGCCTTTCCTGATGGACCTGGAAGGAAAGCAGGGTAACTTCAAGAACCTGCGCGAGTTCGTGTTCAAGAACATCGACGGATACTTCAAGATTTACAGCAAGCACACCCCCATCAACCTGGTCCGTGACCTGCCACAGGGTTTCTCTGCTCTGGAGCCCCTGGTGGACCTGCCAATCGGCATCAACATCACCAGGTTCCAGACTCTGCTGGCTCTGCACCGCTCCTACCTGACTCCAGGTGACTCATCTTCTGGATGGACTGCTGGAGCTGCTGCTTACTACGTGGGTTACCTGCAGCCTCGCACCTTCCTGCTGAAGTACAACGAAAACGGCACCATCACTGACGCCGTCGACTGCGCTCTGGACCCTCTGTCAGAAACCAAGTGCACTCTGAAGTCCTTCACCGTGGAGAAGGGTATCTACCAGACTAGCAACTTCCGCGTGCAGCCCACCGAATCTATCGTCCGTTTCCCAAACATCACTAACCTGTGCCCTTTCGGCGAGGTCTTCAACGCCACCCGCTTCGCTTCCGTGTACGCCTGGAACCGCAAGCGTATCTCAAACTGCGTCGCTGACTACTCCGTGCTGTACAACTCAGCCTCCTTCAGCACCTTCAAGTGCTACGGTGTGTCACCCACTAAGCTGAACGACCTGTGCTTCACCAACGTCTACGCCGACTCCTTCGTGATCCGCGGCGACGAGGTCCGTCAGATCGCTCCAGGCCAGACTGGAAAGATCGCCGACTACAACTACAAGCTGCCTGACGACTTCACCGGCTGCGTCATCGCTTGGAACAGCAACAACCTGGACTCTAAAGTGGGTGGCAACTACAACTACCTGTACAGGCTGTTCAGAAAGAGCAACCTGAAGCCCTTCGAGCGCGACATCAGCACTGAAATCTACCAGGCTGGCTCTACCCCATGCAACGGTGTCGAGGGCTTCAACTGCTACTTCCCTCTGCAGTCTTACGGATTCCAGCCCACTTACGGTGTGGGCTACCAGCCATACCGTGTGGTCGTGCTGAGCTTCGAACTGCTGCACGCCCCTGCTACTGTGTGCGGACCCAAGAAGTCTACCAACCTGGTCAAGAACAAGTGCGTGAACTTCAACTTCAACGGTCTGACCGGAACTGGTGTCCTGACCGAGAGCAACAAGAAGTTCCTGCCCTTCCAGCAGTTCGGTCGCGACATCGACGACACCACTGACGCCGTGCGTGACCCTCAGACCCTGGAAATCCTGGACATCACTCCCTGCTCATTCGGAGGTGTCTCCGTGATCACTCCAGGAACCAACACTTCTAACCAGGTCGCTGTGCTGTACCAGGGTGTCAACTGCACCGAGGTCCCAGTGGCCATCCACGCTGACCAGCTGACCCCTACTTGGAGGGTGTACTCCACCGGCAGCAACGTGTTCCAGACTAGAGCTGGTTGCCTGATCGGCGCCGAGCACGTGAACAACAGCTACGAATGCGACATCCCAATCGGCGCTGGAATCTGCGCCTCTTACCAGACCCAGACTAACAGCCACCAGCAGGCTCAGTCTGTCGCCTCTCAGTCAATCATCGCTTACACTATGTCACTGGGCGCTGAAAACTCCGTGGCCTACTCTAACAACTCAATCGCCATCCCTATCAACTTCACCATCTCAGTGACCACTGAGATCCTGCCCGTCAGCATGACCAAGACTTCTGTGGACTGCACTATGTACATCTGCGGAGACAGCACCGAATGCTCTAACCTGCTGCTGCAGTACGGCTCCTTCTGCACCCAGCTGAACCGCGCTCTGACTGGAATCGCCGTGGAGCAGGACAAGAACACTCAGGAAGTCTTCGCTCAGGTGAAGCAAATCTACAAGACCCCACCTATCAAGGACTTCGGCGGATTCAACTTCTCCCAGATCCTGCCAGACCCTTCCAAGCCAAGCAAGAGGTCTTTCATCGAGGACCTGCTGTTCAACAAGGTCACCCTGGCCGACGCTGGCTTCATCAAGCAGTACGGAGACTGCCTGGGTGACATCGCCGCTCGCGACCTGATCTGCGCTCAGAAGTTCAACGGACTGACCGTGCTGCCCCCACTGCTGACTGACGAAATGATCGCCCAGTACACTTCAGCCCTGCTGGCTGGAACCATCACTTCTGGTTGGACCTTCGGTGCTGGTGCTGCTCTGCAGATCCCTTTCGCTATGCAGATGGCCTACCGTTTCAACGGAATCGGTGTCACCCAGAACGTGCTGTACGAGAACCAGAAGCTGATCGCTAACCAGTTCAACTCCGCCATCGGCAAGATCCAGGACAGCCTGAGCTCTACTGCCTCTGCTCTGGGAAAGCTGCAGGACGTCGTGAACCAGAACGCCCAGGCTCTGAACACCCTGGTCAAGCAGCTGTCATCCAACTTCGGAGCCATCAGCTCTGTGCTGAACGACATCCTCGCTAGGCTGGACCCTCCCGAGGCTGAAGTCCAGATCGACAGGCTGATCACTGGTAGACTGCAGTCACTGCAGACCTACGTGACTCAGCAGCTGATCCGCGCCGCTGAAATCCGTGCCTCCGCTAACCTGGCCGCTACCAAGATGAGCGAGTGCGTCCTGGGACAGTCTAAGAGAGTGGACTTCTGCGGCAAGGGATACCACCTGATGTCATTCCCACAGTCCGCTCCTCACGGTGTCGTGTTCCTGCACGTCACCTACGTGCCCGCCCAGGAGAAGAACTTCACCACTGCCCCAGCTATCTGCCACGACGGCAAGGCTCACTTCCCCCGCGAAGGTGTCTTCGTGTCAAACGGCACCCACTGGTTCGTCACTCAGCGTAACTTCTACGAGCCACAGATCATCACCACTCACAACACTTTCGTGTCCGGAAACTGCGACGTGGTCATCGGTATCGTCAACAACACCGTGTACGACCCTCTGCAGCCCGAGCTGGACTCATTCAAGGAAGAGCTGGACAAGTACTTCAAGAACCACACCTCCCCTGACGTCGACCTGGGCGACATCTCAGGAATCAACGCTTCCGTCGTGAACATCCAGAAGGAGATCGACCGCCTGAACGAAGTGGCCAAGAACCTGAACGAATCACTGATCGACCTGCAGGAGCTGGGCAAGTACGAACAGTACATCAAGTGGCCTTGGTACATCTGGCTGGGTTTCATCGCTGGCCTCATCGCTATCGTGATGGTGACCATCATGCTGTGCTGCATGACTTCATGCTGCTCCTGCCTGAAGGGCTGCTGCAGCTGCGGATCTTGCTGCAAGTTCGACGAGGACGACTCCGAACCCGTCCTGAAGGGAGTGAAGCTGCACTACACCTAA

SEQ ID NO: 136 - protein, 1270 aa, synthetic construct
  REGION 1..1270: note = modified coronavirus S polypeptide
MFVFLVLLPLVSSQCVNLTTRTQLPPAYTNSFTRGVYYPDKVFRSSVLHSTQDLFLPFFSNVTWFHAISGTNGTKRFDNPVLPFNDGVYFASTEKSNIIRGWIFGTTLDSKTQSLLIVNNATNVVIKVCEFQFCNDPFLGVYHKNNKSWMESEFRVYSSANNCTFEYVSQPFLMDLEGKQGNFKNLREFVFKNIDGYFKIYSKHTPINLVRDLPQGFSALEPLVDLPIGINITRFQTLLALHRSYLTPGDSSSGWTAGAAAYYVGYLQPRTFLLKYNENGTITDAVDCALDPLSETKCTLKSFTVEKGIYQTSNFRVQPTESIVRFPNITNLCPFGEVFNATRFASVYAWNRKRISNCVADYSVLYNSASFSTFKCYGVSPTKLNDLCFTNVYADSFVIRGDEVRQIAPGQTGKIADYNYKLPDDFTGCVIAWNSNNLDSKVGGNYNYLYRLFRKSNLKPFERDISTEIYQAGSTPCNGVEGFNCYFPLQSYGFQPTYGVGYQPYRVVVLSFELLHAPATVCGPKKSTNLVKNKCVNFNFNGLTGTGVLTESNKKFLPFQQFGRDIDDTTDAVRDPQTLEILDITPCSFGGVSVITPGTNTSNQVAVLYQGVNCTEVPVAIHADQLTPTWRVYSTGSNVFQTRAGCLIGAEHVNNSYECDIPIGAGICASYQTQTNSHQQAQSVASQSIIAYTMSLGAENSVAYSNNSIAIPINFTISVTTEILPVSMTKTSVDCTMYICGDSTECSNLLLQYGSFCTQLNRALTGIAVEQDKNTQEVFAQVKQIYKTPPIKDFGGFNFSQILPDPSKPSKRSFIEDLLFNKVTLADAGFIKQYGDCLGDIAARDLICAQKFNGLTVLPPLLTDEMIAQYTSALLAGTITSGWTFGAGAALQIPFAMQMAYRFNGIGVTQNVLYENQKLIANQFNSAIGKIQDSLSSTASALGKLQDVVNQNAQALNTLVKQLSSNFGAISSVLNDILARLDPPEAEVQIDRLITGRLQSLQTYVTQQLIRAAEIRASANLAATKMSECVLGQSKRVDFCGKGYHLMSFPQSAPHGVVFLHVTYVPAQEKNFTTAPAICHDGKAHFPREGVFVSNGTHWFVTQRNFYEPQIITTHNTFVSGNCDVVIGIVNNTVYDPLQPELDSFKEELDKYFKNHTSPDVDLGDISGINASVVNIQKEIDRLNEVAKNLNESLIDLQELGKYEQYIKWPWYIWLGFIAGLIAIVMVTIMLCCMTSCCSCLKGCCSCGSCCKFDEDDSEPVLKGVKLHYT

SEQ ID NO: 137 - protein, 1268 aa, synthetic construct
  REGION 1..1268: note = modified coronavirus S polypeptide
MFVFLVLLPLVSSQCVNLTTRTQLPPAYTNSFTRGVYYPDKVFRSSVLHSTQDLFLPFFSNVTWFHAISGTNGTKRFDNPVLPFNDGVYFASTEKSNIIRGWIFGTTLDSKTQSLLIVNNATNVVIKVCEFQFCNDPFLGVYHKNNKSWMESEFRVYSSANNCTFEYVSQPFLMDLEGKQGNFKNLREFVFKNIDGYFKIYSKHTPINLVRDLPQGFSALEPLVDLPIGINITRFQTLLALHRSYLTPGDSSSGWTAGAAAYYVGYLQPRTFLLKYNENGTITDAVDCALDPLSETKCTLKSFTVEKGIYQTSNFRVQPTESIVRFPNITNLCPFGEVFNATRFASVYAWNRKRISNCVADYSVLYNSASFSTFKCYGVSPTKLNDLCFTNVYADSFVIRGDEVRQIAPGQTGKIADYNYKLPDDFTGCVIAWNSNNLDSKVGGNYNYLYRLFRKSNLKPFERDISTEIYQAGSTPCNGVEGFNCYFPLQSYGFQPTYGVGYQPYRVVVLSFELLHAPATVCGPKKSTNLVKNKCVNFNFNGLTGTGVLTESNKKFLPFQQFGRDIDDTTDAVRDPQTLEILDITPCSFGGVSVITPGTNTSNQVAVLYQGVNCTEVPVAIHADQLTPTWRVYSTGSNVFQTRAGCLIGAEHVNNSYECDIPIGAGICASYQTQTNSHGGSVASQSIIAYTMSLGAENSVAYSNNSIAIPINFTISVTTEILPVSMTKTSVDCTMYICGDSTECSNLLLQYGSFCTQLNRALTGIAVEQDKNTQEVFAQVKQIYKTPPIKDFGGFNFSQILPDPSKPSKRSFIEDLLFNKVTLADAGFIKQYGDCLGDIAARDLICAQKFNGLTVLPPLLTDEMIAQYTSALLAGTITSGWTFGAGAALQIPFAMQMAYRFNGIGVTQNVLYENQKLIANQFNSAIGKIQDSLSSTASALGKLQDVVNQNAQALNTLVKQLSSNFGAISSVLNDILARLDPPEAEVQIDRLITGRLQSLQTYVTQQLIRAAEIRASANLAATKMSECVLGQSKRVDFCGKGYHLMSFPQSAPHGVVFLHVTYVPAQEKNFTTAPAICHDGKAHFPREGVFVSNGTHWFVTQRNFYEPQIITTHNTFVSGNCDVVIGIVNNTVYDPLQPELDSFKEELDKYFKNHTSPDVDLGDISGINASVVNIQKEIDRLNEVAKNLNESLIDLQELGKYEQYIKWPWYIWLGFIAGLIAIVMVTIMLCCMTSCCSCLKGCCSCGSCCKFDEDDSEPVLKGVKLHYT

SEQ ID NO: 138 - protein, 1255 aa, synthetic construct
  REGION 1..1255: note = modified coronavirus S polypeptide
QCVNLTTRTQLPPAYTNSFTRGVYYPDKVFRSSVLHSTQDLFLPFFSNVTWFHAISGTNGTKRFDNPVLPFNDGVYFASTEKSNIIRGWIFGTTLDSKTQSLLIVNNATNVVIKVCEFQFCNDPFLGVYHKNNKSWMESEFRVYSSANNCTFEYVSQPFLMDLEGKQGNFKNLREFVFKNIDGYFKIYSKHTPINLVRDLPQGFSALEPLVDLPIGINITRFQTLLALHRSYLTPGDSSSGWTAGAAAYYVGYLQPRTFLLKYNENGTITDAVDCALDPLSETKCTLKSFTVEKGIYQTSNFRVQPTESIVRFPNITNLCPFGEVFNATRFASVYAWNRKRISNCVADYSVLYNSASFSTFKCYGVSPTKLNDLCFTNVYADSFVIRGDEVRQIAPGQTGKIADYNYKLPDDFTGCVIAWNSNNLDSKVGGNYNYLYRLFRKSNLKPFERDISTEIYQAGSTPCNGVEGFNCYFPLQSYGFQPTYGVGYQPYRVVVLSFELLHAPATVCGPKKSTNLVKNKCVNFNFNGLTGTGVLTESNKKFLPFQQFGRDIDDTTDAVRDPQTLEILDITPCSFGGVSVITPGTNTSNQVAVLYQGVNCTEVPVAIHADQLTPTWRVYSTGSNVFQTRAGCLIGAEHVNNSYECDIPIGAGICASYQTQTNSHGGSVASQSIIAYTMSLGAENSVAYSNNSIAIPINFTISVTTEILPVSMTKTSVDCTMYICGDSTECSNLLLQYGSFCTQLNRALTGIAVEQDKNTQEVFAQVKQIYKTPPIKDFGGFNFSQILPDPSKPSKRSFIEDLLFNKVTLADAGFIKQYGDCLGDIAARDLICAQKFNGLTVLPPLLTDEMIAQYTSALLAGTITSGWTFGAGAALQIPFAMQMAYRFNGIGVTQNVLYENQKLIANQFNSAIGKIQDSLSSTASALGKLQDVVNQNAQALNTLVKQLSSNFGAISSVLNDILARLDPPEAEVQIDRLITGRLQSLQTYVTQQLIRAAEIRASANLAATKMSECVLGQSKRVDFCGKGYHLMSFPQSAPHGVVFLHVTYVPAQEKNFTTAPAICHDGKAHFPREGVFVSNGTHWFVTQRNFYEPQIITTHNTFVSGNCDVVIGIVNNTVYDPLQPELDSFKEELDKYFKNHTSPDVDLGDISGINASVVNIQKEIDRLNEVAKNLNESLIDLQELGKYEQYIKWPWYIWLGFIAGLIAIVMVTIMLCCMTSCCSCLKGCCSCGSCCKFDEDDSEPVLKGVKLHYT

SEQ ID NO: 139 - DNA, 3807 bp, synthetic construct
  misc_feature 1..3807: note = modified coronavirus S polypeptide
  source 1..3807: mol_type = other DNA
atgttcgtcttcctggtgctgctgcctctggtgtccagccagtgcgtgaacctgaccactaggactcagctgcctcccgcttacaccaacagcttcactaggggtgtctactaccctgacaaggtcttccgctcctcagtgctgcactctactcaggacctgttcctgcccttcttctcaaacgtgacctggttccacgccatctccggcaccaacggcactaagaggttcgacaaccccgtgctgccattcaacgacggcgtctacttcgcttcaaccgagaagtccaacatcatcagaggatggatcttcggcaccactctggacagcaagactcagtctctgctgatcgtcaacaacgccaccaacgtggtcatcaaggtgtgcgaattccagttctgcaacgacccattcctgggtgtgtaccacaagaacaacaagtcatggatggagtccgaattccgcgtctactccagcgctaacaactgcactttcgagtacgtgagccagcctttcctgatggacctggaaggaaagcagggtaacttcaagaacctgcgcgagttcgtgttcaagaacatcgacggatacttcaagatttacagcaagcacacccccatcaacctggtccgtgacctgccacagggtttctctgctctggagcccctggtggacctgccaatcggcatcaacatcaccaggttccagactctgctggctctgcaccgctcctacctgactccaggtgactcatcttctggatggactgctggagctgctgcttactacgtgggttacctgcagcctcgcaccttcctgctgaagtacaacgaaaacggcaccatcactgacgccgtcgactgcgctctggaccctctgtcagaaaccaagtgcactctgaagtccttcaccgtggagaagggtatctaccagactagcaacttccgcgtgcagcccaccgaatctatcgtccgtttcccaaacatcactaacctgtgccctttcggcgaggtcttcaacgccacccgcttcgcttccgtgtacgcctggaaccgcaagcgtatctcaaactgcgtcgctgactactccgtgctgtacaactcagcctccttcagcaccttcaagtgctacggtgtgtcacccactaagctgaacgacctgtgcttcaccaacgtctacgccgactccttcgtgatccgcggcgacgaggtccgtcagatcgctccaggccagactggaaagatcgccgactacaactacaagctgcctgacgacttcaccggctgcgtcatcgcttggaacagcaacaacctggactctaaagtgggtggcaactacaactacctgtacaggctgttcagaaagagcaacctgaagcccttcgagcgcgacatcagcactgaaatctaccaggctggctctaccccatgcaacggtgtcgagggcttcaactgctacttccctctgcagtcttacggattccagcccacttacggtgtgggctaccagccataccgtgtggtcgtgctgagcttcgaactgctgcacgcccctgctactgtgtgcggacccaagaagtctaccaacctggtcaagaacaagtgcgtgaacttcaacttcaacggtctgaccggaactggtgtcctgaccgagagcaacaagaagttcctgcccttccagcagttcggtcgcgacatcgacgacaccactgacgccgtgcgtgaccctcagaccctggaaatcctggacatcactccctgctcattcggaggtgtctccgtgatcactccaggaaccaacacttctaaccaggtcgctgtgctgtaccagggtgtcaactgcaccgaggtcccagtggccatccacgctgaccagctgacccctacttggagggtgtactccaccggcagcaacgtgttccagactagagctggttgcctgatcggcgccgagcacgtgaacaacagctacgaatgcgacatcccaatcggcgctggaatctgcgcctcttaccagacccagactaacagccacggtggttctgtcgcctctcagtcaatcatcgcttacactatgtcactgggcgctgaaaactccgtggcctactctaacaactcaatcgccatccctatcaacttcaccatctcagtgaccactgagatcctgcccgtcagcatgaccaagacttctgtggactgcactatgtacatctgcggagacagcaccgaatgctctaacctgctgctgcagtacggctccttctgcacccagctgaaccgcgctctgactggaatcgccgtggagcaggacaagaacactcaggaagtcttcgctcaggtgaagcaaatctacaagaccccacctatcaaggacttcggcggattcaacttctcccagatcctgccagacccttccaagccaagcaagaggtctttcatcgaggacctgctgttcaacaaggtcaccctggccgacgctggcttcatcaagcagtacggagactgcctgggtgacatcgccgctcgcgacctgatctgcgctcagaagttcaacggactgaccgtgctgcccccactgctgactgacgaaatgatcgcccagtacacttcagccctgctggctggaaccatcacttctggttggaccttcggtgctggtgctgctctgcagatccctttcgctatgcagatggcctaccgtttcaacggaatcggtgtcacccagaacgtgctgtacgagaaccagaagctgatcgctaaccagttcaactccgccatcggcaagatccaggacagcctgagctctactgcctctgctctgggaaagctgcaggacgtcgtgaaccagaacgcccaggctctgaacaccctggtcaagcagctgtcatccaacttcggagccatcagctctgtgctgaacgacatcctcgctaggctggaccctcccgaggctgaagtccagatcgacaggctgatcactggtagactgcagtcactgcagacctacgtgactcagcagctgatccgcgccgctgaaatccgtgcctccgctaacctggccgctaccaagatgagcgagtgcgtcctgggacagtctaagagagtggacttctgcggcaagggataccacctgatgtcattcccacagtccgctcctcacggtgtcgtgttcctgcacgtcacctacgtgcccgcccaggagaagaacttcaccactgccccagctatctgccacgacggcaaggctcacttcccccgcgaaggtgtcttcgtgtcaaacggcacccactggttcgtcactcagcgtaacttctacgagccacagatcatcaccactcacaacactttcgtgtccggaaactgcgacgtggtcatcggtatcgtcaacaacaccgtgtacgaccctctgcagcccgagctggactcattcaaggaagagctggacaagtacttcaagaaccacacctcccctgacgtcgacctgggcgacatctcaggaatcaacgcttccgtcgtgaacatccagaaggagatcgaccgcctgaacgaagtggccaagaacctgaacgaatcactgatcgacctgcaggagctgggcaagtacgaacagtacatcaagtggccttggtacatctggctgggtttcatcgctggcctcatcgctatcgtgatggtgaccatcatgctgtgctgcatgacttcatgctgctcctgcctgaagggctgctgcagctgcggatcttgctgcaagttcgacgaggacgactccgaacccgtcctgaagggagtgaagctgcactacacctaa

SEQ ID NO: 140 - protein, 1270 aa, synthetic construct
  REGION 1..1270: note = modified coronavirus S polypeptide
MFVFLVLLPLVSSQCVNLTTRTQLPPAYTNSFTRGVYYPDKVFRSSVLHSTQDLFLPFFSNVTWFHAIHVSGTNGTKRFANPVLPFNDGVYFASTEKSNIIRGWIFGTTLDSKTQSLLIVNNATNVVIKVCEFQFCNDPFLGVYYHKNNKSWMESEFRVYSSANNCTFEYVSQPFLMDLEGKQGNFKNLREFVFKNIDGYFKIYSKHTPINLVRGLPQGFSALEPLVDLPIGINITRFQTLHALHRSYLTPGDSSSGWTAGAAAYYVGYLQPRTFLLKYNENGTITDAVDCALDPLSETKCTLKSFTVEKGIYQTSNFRVQPTESIVRFPNITNLCPFGEVFNATRFASVYAWNRKRISNCVADYSVLYNSASFSTFKCYGVSPTKLNDLCFTNVYADSFVIRGDEVRQIAPGQTGNIADYNYKLPDDFTGCVIAWNSNNLDSKVGGNYNYLYRLFRKSNLKPFERDISTEIYQAGSTPCNGVKGFNCYFPLQSYGFQPTYGVGYQPYRVVVLSFELLHAPATVCGPKKSTNLVKNKCVNFNFNGLTGTGVLTESNKKFLPFQQFGRDIADTTDAVRDPQTLEILDITPCSFGGVSVITPGTNTSNQVAVLYQGVNCTEVPVAIHADQLTPTWRVYSTGSNVFQTRAGCLIGAEHVNNSYECDIPIGAGICASYQTQTNSPGGSVASQSIIAYTMSLGVENSVAYSNNSIAIPTNFTISVTTEILPVSMTKTSVDCTMYICGDSTECSNLLLQYGSFCTQLNRALTGIAVEQDKNTQEVFAQVKQIYKTPPIKDFGGNFSQILPDPSKPSKRSFIEDLLFNKVTLADAGFIKQYGDCLGDIAARDLICAQKFNGLTVLPPLLTDEMIAQYTSALLAGTITSGWTFGAGAALQIPFAMQMAYRFNGIGVTQNVLYENQKLIANQFNSAIGKIQDSLSSTASALGKLQDVVNQNAQALNTLVKQLSSNFGAISSVLNDILSRLDPPEAEVQIDRLITGRLQSLQTYVTQQLIRAAEIRASANLAATKMSECVLGQSKRVDFCGKGYHLMSFPQSAPHGVVFLHVTYVPAQEKNFTTAPAICHDGKAHFPREGVFVSNGTHWFVTQRNFYEPQIITTDNTFVSGNCDVVIGIVNNTVYDPLQPELDSFKEELDKYFKNHTSPDVDLGDISGINASVVNIQKEIDRLNEVAKNLNESLIDLQELGKYEQYIKWPWYIWLGFIAGLIAIVMVTIMLCCMTSCCSCLKGCCSCGSCCKFDEDDSEPVLKGVKLHYT

SEQ ID NO: 141 - protein, 1257 aa, synthetic construct
  REGION 1..1257: note = modified coronavirus S polypeptide
QCVNLTTRTQLPPAYTNSFTRGVYYPDKVFRSSVLHSTQDLFLPFFSNVTWFHAIHVSGTNGTKRFANPVLPFNDGVYFASTEKSNIIRGWIFGTTLDSKTQSLLIVNNATNVVIKVCEFQFCNDPFLGVYYHKNNKSWMESEFRVYSSANNCTFEYVSQPFLMDLEGKQGNFKNLREFVFKNIDGYFKIYSKHTPINLVRGLPQGFSALEPLVDLPIGINITRFQTLHALHRSYLTPGDSSSGWTAGAAAYYVGYLQPRTFLLKYNENGTITDAVDCALDPLSETKCTLKSFTVEKGIYQTSNFRVQPTESIVRFPNITNLCPFGEVFNATRFASVYAWNRKRISNCVADYSVLYNSASFSTFKCYGVSPTKLNDLCFTNVYADSFVIRGDEVRQIAPGQTGNIADYNYKLPDDFTGCVIAWNSNNLDSKVGGNYNYLYRLFRKSNLKPFERDISTEIYQAGSTPCNGVKGFNCYFPLQSYGFQPTYGVGYQPYRVVVLSFELLHAPATVCGPKKSTNLVKNKCVNFNFNGLTGTGVLTESNKKFLPFQQFGRDIADTTDAVRDPQTLEILDITPCSFGGVSVITPGTNTSNQVAVLYQGVNCTEVPVAIHADQLTPTWRVYSTGSNVFQTRAGCLIGAEHVNNSYECDIPIGAGICASYQTQTNSPGGSVASQSIIAYTMSLGVENSVAYSNNSIAIPTNFTISVTTEILPVSMTKTSVDCTMYICGDSTECSNLLLQYGSFCTQLNRALTGIAVEQDKNTQEVFAQVKQIYKTPPIKDFGGNFSQILPDPSKPSKRSFIEDLLFNKVTLADAGFIKQYGDCLGDIAARDLICAQKFNGLTVLPPLLTDEMIAQYTSALLAGTITSGWTFGAGAALQIPFAMQMAYRFNGIGVTQNVLYENQKLIANQFNSAIGKIQDSLSSTASALGKLQDVVNQNAQALNTLVKQLSSNFGAISSVLNDILSRLDPPEAEVQIDRLITGRLQSLQTYVTQQLIRAAEIRASANLAATKMSECVLGQSKRVDFCGKGYHLMSFPQSAPHGVVFLHVTYVPAQEKNFTTAPAICHDGKAHFPREGVFVSNGTHWFVTQRNFYEPQIITTDNTFVSGNCDVVIGIVNNTVYDPLQPELDSFKEELDKYFKNHTSPDVDLGDISGINASVVNIQKEIDRLNEVAKNLNESLIDLQELGKYEQYIKWPWYIWLGFIAGLIAIVMVTIMLCCMTSCCSCLKGCCSCGSCCKFDEDDSEPVLKGVKLHYT

SEQ ID NO: 142 - DNA, 3816 bp, synthetic construct
  misc_feature 1..3816: note = modified coronavirus S polypeptide
  source 1..3816: mol_type = other DNA
atgttcgtcttcctggtgctgctgcctctggtgtccagccagtgcgtgaacctgaccactaggactcagctgcctcccgcttacaccaactcattcactaggggtgtgtactacccagacaaggtcttccgctcctcagtgctgcactcaactcaggacctgttcctgcctttcttctccaacgtcacctggttccacgctatccacgtgtccggcaccaacggcactaagaggttcgccaaccccgtgctgccattcaacgacggagtctacttcgcttcaaccgagaagtccaacatcatcagaggatggatcttcggcaccactctggacagcaagactcagtctctgctgatcgtcaacaacgctaccaacgtggtcatcaaggtgtgcgaattccagttctgtaacgaccccttcctgggtgtctactaccacaagaacaacaagtcatggatggagtccgaattccgcgtctactccagcgctaacaactgcactttcgagtacgtgtcccagccattcctgatggacctggaaggaaagcagggtaacttcaagaacctgcgcgagttcgtgttcaagaacatcgacggctacttcaagatttacagcaagcacacccccatcaacctggtccgtggcctgccacagggattctctgctctggagcccctggtggacctgccaatcggcatcaacatcaccaggttccagactctgcacgccctgcacagatcctacctgactcccggagactcttcatccggttggaccgctggcgctgccgcttactacgtgggttacctgcagccacgcaccttcctgctgaagtacaacgaaaacggcaccatcactgacgccgtcgactgcgctctggacccactgtcagaaaccaagtgcactctgaagtccttcaccgtggagaagggaatctaccagacttcaaacttccgcgtgcagcctaccgaatccatcgtccgtttcccaaacatcactaacctgtgccctttcggagaggtcttcaacgccacccgcttcgcttccgtgtacgcctggaaccgcaagcgtatctcaaactgcgtcgctgactactccgtgctgtacaactcagcctccttcagcaccttcaagtgctacggagtgtcacccactaagctgaacgacctgtgcttcaccaacgtctacgctgactccttcgtgatccgcggtgacgaggtccgtcagatcgctccaggccagactggaaacatcgccgactacaactacaagctgcctgacgacttcaccggttgcgtcatcgcctggaacagcaacaacctggactctaaagtgggtggcaactacaactacctgtacaggctgttcagaaagtcaaacctgaagcccttcgagcgcgacatcagcactgaaatctaccaggctggttctaccccatgcaacggtgtcaagggcttcaactgctacttccctctgcagtcctacggcttccagcccacttacggtgtgggctaccagccataccgtgtggtcgtgctgagcttcgagctgctgcacgcccctgctactgtgtgcggacccaagaagtctaccaacctggtcaagaacaagtgcgtgaacttcaacttcaacggtctgaccggaactggtgtcctgaccgagagcaacaagaagttcctgcctttccagcagttcggtcgcgacatcgctgacaccactgacgccgtgcgtgaccctcagaccctggaaatcctggacatcactccctgctcattcggaggtgtctccgtgatcactcccggaaccaacacttctaaccaggtcgctgtgctgtaccagggtgtgaactgcaccgaagtcccagtggccatccacgctgaccagctgacccctacttggagggtgtactccaccggcagcaacgtcttccagactagagctggatgcctgatcggtgccgagcacgtcaacaacagctacgaatgcgacatccctatcggcgctggaatctgcgcctcttaccagacccagactaacagcccaggtggttctgtggcctctcagtcaatcatcgcctacaccatgtcactgggtgtcgaaaactccgtggcttactctaacaactcaatcgccatccctaccaacttcactatcagcgtgaccactgagatcctgcccgtcagcatgaccaagacttctgtggactgcactatgtacatctgcggcgacagcaccgaatgctctaacctgctgctgcagtacggttctttctgcacccagctgaaccgcgctctgactggcatcgccgtggagcaggacaagaacactcaggaagtcttcgctcaggtgaagcaaatctacaagaccccacctatcaaggacttcggcggattcaacttctcccagatcctgccagacccttccaagcccagcaagaggtctttcatcgaggacctgctgttcaacaaggtcactctggccgacgctggtttcatcaagcagtacggcgactgcctgggagacatcgctgctcgcgacctgatctgcgcccagaagttcaacggcctgaccgtgctgcccccactgctgactgacgaaatgatcgctcagtacactagcgccctgctggctggcaccatcacttcaggttggactttcggtgctggtgctgctctgcagatcccattcgctatgcagatggcctaccgtttcaacggaatcggtgtcacccagaacgtgctgtacgagaaccagaagctgatcgctaaccagttcaactcagccatcggcaagatccaggacagcctgagctctactgcctctgctctgggaaagctgcaggacgtcgtgaaccagaacgcccaggctctgaacaccctggtcaagcagctgtcatccaacttcggcgccatcagctctgtgctgaacgacatcctgtccaggctggaccctcccgaggctgaagtccagatcgacaggctgatcactggaagactgcagtcactgcagacctacgtgactcagcagctgatccgcgccgctgaaatccgtgcctccgctaacctggccgctaccaagatgagcgagtgcgtcctgggccagtctaagagagtggacttctgcggcaagggataccacctgatgtcattcccacagtccgcccctcacggagtcgtgttcctgcacgtcacctacgtgcccgctcaggagaagaacttcaccactgccccagctatctgccacgacggcaaggctcacttccctcgcgaaggagtcttcgtgagcaacggcacccactggttcgtcactcagcgtaacttctacgagccccagatcatcaccactgacaacactttcgtgtctggcaactgcgacgtggtcatcggtatcgtcaacaacaccgtgtacgaccctctgcagcccgagctggactcattcaaggaagagctggacaagtacttcaagaaccacacctcccctgacgtcgacctgggtgacatctcaggcatcaacgcctccgtcgtgaacatccagaaggagatcgaccgcctgaacgaagtggctaagaacctgaacgaaagcctgatcgacctgcaggagctgggcaagtacgaacagtacatcaagtggccatggtacatctggctgggattcatcgctggcctcatcgctatcgtgatggtgaccatcatgctgtgctgcatgacttcatgctgctcctgcctgaagggttgctgcagctgcggctcttgctgcaagttcgacgaggacgactctgaacctgtcctgaagggagtgaagctgcactacacctaa

SEQ ID NO: 143 - protein, 1269 aa, synthetic construct
  REGION 1..1269: note = modified coronavirus S polypeptide
MFVFLVLLPLVSSQCVNFTTRTQLPPAYTNSFTRGVYYPDKVFRSSVLHSTQDLFLPFFSNVTWFHAIHVSGTNGTKRFANPVLPFNDGVYFASTEKSNIIRGWIFGTTLDSKTQSLLIVNNATNVVIKVCEFQFCNDPFLGVYYHKNNKSWMESEFRVYSSANNCTFEYVSQPFLMDLEGKQGNFKNLREFVFKNIDGYFKIYSKHTPINLVRGLPQGFSALEPLVDLPIGINITRFQTLHRSYLTPGDSSSGWTAGAAAYYVGYLQPRTFLLKYNENGTITDAVDCALDPLSETKCTLKSFTVEKGIYQTSNFRVQPTESIVRFPNITNLCPFGEVFNATRFASVYAWNRKRISNCVADYSVLYNSASFSTFKCYGVSPTKLNDLCFTNVYADSFVIRGDEVRQIAPGQTGNIADYNYKLPDDFTGCVIAWNSNNLDSKVGGNYNYLYRLFRKSNLKPFERDISTEIYQAGSTPCNGVKGFNCYFPLQSYGFQPTYGVGYQPYRVVVLSFELLHAPATVCGPKKSTNLVKNKCVNFNFNGLTGTGVLTESNKKFLPFQQFGRDIADTTDAVRDPQTLEILDITPCSFGGVSVITPGTNTSNQVAVLYQGVNCTEVPVAIHADQLTPTWRVYSTGSNVFQTRAGCLIGAEHVNNSYECDIPIGAGICASYQTQTNSPQQAQSVASQSIIAYTMSLGVENSVAYSNNSIAIPTNFTISVTTEILPVSMTKTSVDCTMYICGDSTECSNLLLQYGSFCTQLNRALTGIAVEQDKNTQEVFAQVKQIYKTPPIKDFGGNFSQILPDPSKPSKRSFIEDLLFNKVTLADAGFIKQYGDCLGDIAARDLICAQKFNGLTVLPPLLTDEMIAQYTSALLAGTITSGWTFGAGAALQIPFAMQMAYRFNGIGVTQNVLYENQKLIANQFNSAIGKIQDSLSSTASALGKLQDVVNQNAQALNTLVKQLSSNFGAISSVLNDILSRLDPPEAEVQIDRLITGRLQSLQTYVTQQLIRAAEIRASANLAATKMSECVLGQSKRVDFCGKGYHLMSFPQSAPHGVVFLHVTYVPAQEKNFTTAPAICHDGKAHFPREGVFVSNGTHWFVTQRNFYEPQIITTDNTFVSGNCDVVIGIVNNTVYDPLQPELDSFKEELDKYFKNHTSPDVDLGDISGINASVVNIQKEIDRLNEVAKNLNESLIDLQELGKYEQYIKWPWYIWLGFIAGLIAIVMVTIMLCCMTSCCSCLKGCCSCGSCCKFDEDDSEPVLKGVKLHYT

SEQ ID NO: 144 - protein, 1256 aa, synthetic construct
  REGION 1..1256: note = modified coronavirus S polypeptide
QCVNFTTRTQLPPAYTNSFTRGVYYPDKVFRSSVLHSTQDLFLPFFSNVTWFHAIHVSGTNGTKRFANPVLPFNDGVYFASTEKSNIIRGWIFGTTLDSKTQSLLIVNNATNVVIKVCEFQFCNDPFLGVYYHKNNKSWMESEFRVYSSANNCTFEYVSQPFLMDLEGKQGNFKNLREFVFKNIDGYFKIYSKHTPINLVRGLPQGFSALEPLVDLPIGINITRFQTLHRSYLTPGDSSSGWTAGAAAYYVGYLQPRTFLLKYNENGTITDAVDCALDPLSETKCTLKSFTVEKGIYQTSNFRVQPTESIVRFPNITNLCPFGEVFNATRFASVYAWNRKRISNCVADYSVLYNSASFSTFKCYGVSPTKLNDLCFTNVYADSFVIRGDEVRQIAPGQTGNIADYNYKLPDDFTGCVIAWNSNNLDSKVGGNYNYLYRLFRKSNLKPFERDISTEIYQAGSTPCNGVKGFNCYFPLQSYGFQPTYGVGYQPYRVVVLSFELLHAPATVCGPKKSTNLVKNKCVNFNFNGLTGTGVLTESNKKFLPFQQFGRDIADTTDAVRDPQTLEILDITPCSFGGVSVITPGTNTSNQVAVLYQGVNCTEVPVAIHADQLTPTWRVYSTGSNVFQTRAGCLIGAEHVNNSYECDIPIGAGICASYQTQTNSPQQAQSVASQSIIAYTMSLGVENSVAYSNNSIAIPTNFTISVTTEILPVSMTKTSVDCTMYICGDSTECSNLLLQYGSFCTQLNRALTGIAVEQDKNTQEVFAQVKQIYKTPPIKDFGGNFSQILPDPSKPSKRSFIEDLLFNKVTLADAGFIKQYGDCLGDIAARDLICAQKFNGLTVLPPLLTDEMIAQYTSALLAGTITSGWTFGAGAALQIPFAMQMAYRFNGIGVTQNVLYENQKLIANQFNSAIGKIQDSLSSTASALGKLQDVVNQNAQALNTLVKQLSSNFGAISSVLNDILSRLDPPEAEVQIDRLITGRLQSLQTYVTQQLIRAAEIRASANLAATKMSECVLGQSKRVDFCGKGYHLMSFPQSAPHGVVFLHVTYVPAQEKNFTTAPAICHDGKAHFPREGVFVSNGTHWFVTQRNFYEPQIITTDNTFVSGNCDVVIGIVNNTVYDPLQPELDSFKEELDKYFKNHTSPDVDLGDISGINASVVNIQKEIDRLNEVAKNLNESLIDLQELGKYEQYIKWPWYIWLGFIAGLIAIVMVTIMLCCMTSCCSCLKGCCSCGSCCKFDEDDSEPVLKGVKLHYT

SEQ ID NO: 145 - DNA, 3812 bp, synthetic construct
  misc_feature 1..3812: note = modified coronavirus S polypeptide
  source 1..3812: mol_type = other DNA
atgttcgtcttcctggtgctgctgcctctggtgtccagccagtgcgtgaacttcaccactaggactcagctgcctcccgcttacaccaactcattcactaggggtgtgtactacccagacaaggtcttccgctcctcagtgctgcactcaactcaggacctgttcctgcctttcttctccaacgtcacctggttccacgctatccacgtgtccggcaccaacggcactaagaggttcgccaaccccgtgctgccattcaacgacggagtctacttcgcttcaaccgagaagtccaacatcatcagaggatggatcttcggcaccactctggacagcaagactcagtctctgctgatcgtcaacaacgctaccaacgtggtcatcaaggtgtgcgaattccagttctgtaacgaccccttcctgggtgtctactaccacaagaacaacaagtcatggatggagtccgaattccgcgtctactccagcgctaacaactgcactttcgagtacgtgtcccagccattcctgatggacctggaaggaaagcagggtaacttcaagaacctgcgcgagttcgtgttcaagaacatcgacggctacttcaagatttacagcaagcacacccccatcaacctggtccgtggcctgccacagggattctctgctctggagcccctggtggacctgccaatcggcatcaacatcaccaggttccagactctgcacagatcctacctgactcccggagactcttcatccggttggaccgctggcgctgccgcttactacgtgggttacctgcagccacgcaccttcctgctgaagtacaacgaaaacggcaccatcactgacgccgtcgactgcgctctggacccactgtcagaaaccaagtgcactctgaagtccttcaccgtggagaagggaatctaccagacttcaaacttccgcgtgcagcctaccgaatccatcgtccgtttcccaaacatcactaacctgtgccctttcggagaggtcttcaacgccacccgcttcgcttccgtgtacgcctggaaccgcaagcgtatctcaaactgcgtcgctgactactccgtgctgtacaactcagcctccttcagcaccttcaagtgctacggagtgtcacccactaagctgaacgacctgtgcttcaccaacgtctacgctgactccttcgtgatccgcggtgacgaggtccgtcagatcgctccaggccagactggaaacatcgccgactacaactacaagctgcctgacgacttcaccggttgcgtcatcgcctggaacagcaacaacctggactctaaagtgggtggcaactacaactacctgtacaggctgttcagaaagtcaaacctgaagcccttcgagcgcgacatcagcactgaaatctaccaggctggttctaccccatgcaacggtgtcaagggcttcaactgctacttccctctgcagtcctacggcttccagcccacttacggtgtgggctaccagccataccgtgtggtcgtgctgagcttcgagctgctgcacgcccctgctactgtgtgcggacccaagaagtctaccaacctggtcaagaacaagtgcgtgaacttcaacttcaacggtctgaccggaactggtgtcctgaccgagagcaacaagaagttcctgcctttccagcagttcggtcgcgacatcgctgacaccactgacgccgtgcgtgaccctcagaccctggaaatcctggacatcactccctgctcattcggaggtgtctccgtgatcactcccggaaccaacacttctaaccaggtcgctgtgctgtaccagggtgtgaactgcaccgaagtcccagtggccatccacgctgaccagctgacccctacttggagggtgtactccaccggcagcaacgtcttccagactagagctggatgcctgatcggtgccgagcacgtcaacaacagctacgaatgcgacatccctatcggcgctggaatctgcgcctcttaccagacccagactaacagcccccagcaggctcagtctgtggcctctcagtcaatcatcgcctacaccatgtcactgggtgtcgaaaactccgtggcttactctaacaactcaatcgccatccctaccaacttcactatcagcgtgaccactgagatcctgcccgtcagcatgaccaagacttctgtggactgcactatgtacatctgcggcgacagcaccgaatgctctaacctgctgctgcagtacggttctttctgcacccagctgaaccgcgctctgactggcatcgccgtggagcaggacaagaacactcaggaagtcttcgctcaggtgaagcaaatctacaagaccccacctatcaaggacttcggcggattcaacttctcccagatcctgccagacccttccaagcccagcaagaggtctttcatcgaggacctgctgttcaacaaggtcactctggccgacgctggtttcatcaagcagtacggcgactgcctgggagacatcgctgctcgcgacctgatctgcgcccagaagttcaacggcctgaccgtgctgcccccactgctgactgacgaaatgatcgctcagtacactagcgccctgctggctggcaccatcacttcaggttggactttcggtgctggtgctgctctgcagatcccattcgctatgcagatggcctaccgtttcaacggaatcggtgtcacccagaacgtgctgtacgagaaccagaagctgatcgctaaccagttcaactcagccatcggcaagatccaggacagcctgagctctactgcctctgctctgggaaagctgcaggacgtcgtgaaccagaacgcccaggctctgaacaccctggtcaagcagctgtcatccaacttcggcgccatcagctctgtgctgaacgacatcctgtccaggctggaccctcccgaggctgaagtccagatcgacaggctgatcactggaagactgcagtcactgcagacctacgtgactcagcagctgatccgcgccgctgaaatccgtgcctccgctaacctggccgctaccaagatgagcgagtgcgtcctgggccagtctaagagagtggacttctgcggcaagggataccacctgatgtcattcccacagtccgcccctcacggagtcgtgttcctgcacgtcacctacgtgcccgctcaggagaagaacttcaccactgccccagctatctgccacgacggcaaggctcacttccctcgcgaaggagtcttcgtgagcaacggcacccactggttcgtcactcagcgtaacttctacgagccccagatcatcaccactgacaacactttcgtgtctggcaactgcgacgtggtcatcggtatcgtcaacaacaccgtgtacgaccctctgcagcccgagctggactcattcaaggaagagctggacaagtacttcaagaaccacacctcccctgacgtcgacctgggtgacatctcaggcatcaacgcctccgtcgtgaacatccagaaggagatcgaccgcctgaacgaagtggctaagaacctgaacgaaagcctgatcgacctgcaggagctgggcaagtacgaacagtacatcaagtggccatggtacatctggctgggattcatcgctggcctcatcgctatcgtgatggtgaccatcatgctgtgctgcatgacttcatgctgctcctgcctgaagggttgctgcagctgcggctcttgctgcaagttcgacgaggacgactctgaaccttcctgaagggagtgaagctgcactacacctaa

SEQ ID NO: 146 - protein, 1267 aa, synthetic construct
  REGION 1..1267: note = modified coronavirus S polypeptide
MFVFLVLLPLVSSQCVNFTTRTQLPPAYTNSFTRGVYYPDKVFRSSVLHSTQDLFLPFFSNVTWFHAIHVSGTNGTKRFANPVLPFNDGVYFASTEKSNIIRGWIFGTTLDSKTQSLLIVNNATNVVIKVCEFQFCNDPFLGVYYHKNNKSWMESEFRVYSSANNCTFEYVSQPFLMDLEGKQGNFKNLREFVFKNIDGYFKIYSKHTPINLVRGLPQGFSALEPLVDLPIGINITRFQTLHRSYLTPGDSSSGWTAGAAAYYVGYLQPRTFLLKYNENGTITDAVDCALDPLSETKCTLKSFTVEKGIYQTSNFRVQPTESIVRFPNITNLCPFGEVFNATRFASVYAWNRKRISNCVADYSVLYNSASFSTFKCYGVSPTKLNDLCFTNVYADSFVIRGDEVRQIAPGQTGNIADYNYKLPDDFTGCVIAWNSNNLDSKVGGNYNYLYRLFRKSNLKPFERDISTEIYQAGSTPCNGVKGFNCYFPLQSYGFQPTYGVGYQPYRVVVLSFELLHAPATVCGPKKSTNLVKNKCVNFNFNGLTGTGVLTESNKKFLPFQQFGRDIADTTDAVRDPQTLEILDITPCSFGGVSVITPGTNTSNQVAVLYQGVNCTEVPVAIHADQLTPTWRVYSTGSNVFQTRAGCLIGAEHVNNSYECDIPIGAGICASYQTQTNSPGGSVASQSIIAYTMSLGVENSVAYSNNSIAIPTNFTISVTTEILPVSMTKTSVDCTMYICGDSTECSNLLLQYGSFCTQLNRALTGIAVEQDKNTQEVFAQVKQIYKTPPIKDFGGNFSQILPDPSKPSKRSFIEDLLFNKVTLADAGFIKQYGDCLGDIAARDLICAQKFNGLTVLPPLLTDEMIAQYTSALLAGTITSGWTFGAGAALQIPFAMQMAYRFNGIGVTQNVLYENQKLIANQFNSAIGKIQDSLSSTASALGKLQDVVNQNAQALNTLVKQLSSNFGAISSVLNDILSRLDPPEAEVQIDRLITGRLQSLQTYVTQQLIRAAEIRASANLAATKMSECVLGQSKRVDFCGKGYHLMSFPQSAPHGVVFLHVTYVPAQEKNFTTAPAICHDGKAHFPREGVFVSNGTHWFVTQRNFYEPQIITTDNTFVSGNCDVVIGIVNNTVYDPLQPELDSFKEELDKYFKNHTSPDVDLGDISGINASVVNIQKEIDRLNEVAKNLNESLIDLQELGKYEQYIKWPWYIWLGFIAGLIAIVMVTIMLCCMTSCCSCLKGCCSCGSCCKFDEDDSEPVLKGVKLHYT

SEQ ID NO: 147 - protein, 1254 aa, synthetic construct
  REGION 1..1254: note = modified coronavirus S polypeptide
QCVNFTTRTQLPPAYTNSFTRGVYYPDKVFRSSVLHSTQDLFLPFFSNVTWFHAIHVSGTNGTKRFANPVLPFNDGVYFASTEKSNIIRGWIFGTTLDSKTQSLLIVNNATNVVIKVCEFQFCNDPFLGVYYHKNNKSWMESEFRVYSSANNCTFEYVSQPFLMDLEGKQGNFKNLREFVFKNIDGYFKIYSKHTPINLVRGLPQGFSALEPLVDLPIGINITRFQTLHRSYLTPGDSSSGWTAGAAAYYVGYLQPRTFLLKYNENGTITDAVDCALDPLSETKCTLKSFTVEKGIYQTSNFRVQPTESIVRFPNITNLCPFGEVFNATRFASVYAWNRKRISNCVADYSVLYNSASFSTFKCYGVSPTKLNDLCFTNVYADSFVIRGDEVRQIAPGQTGNIADYNYKLPDDFTGCVIAWNSNNLDSKVGGNYNYLYRLFRKSNLKPFERDISTEIYQAGSTPCNGVKGFNCYFPLQSYGFQPTYGVGYQPYRVVVLSFELLHAPATVCGPKKSTNLVKNKCVNFNFNGLTGTGVLTESNKKFLPFQQFGRDIADTTDAVRDPQTLEILDITPCSFGGVSVITPGTNTSNQVAVLYQGVNCTEVPVAIHADQLTPTWRVYSTGSNVFQTRAGCLIGAEHVNNSYECDIPIGAGICASYQTQTNSPGGSVASQSIIAYTMSLGVENSVAYSNNSIAIPTNFTISVTTEILPVSMTKTSVDCTMYICGDSTECSNLLLQYGSFCTQLNRALTGIAVEQDKNTQEVFAQVKQIYKTPPIKDFGGNFSQILPDPSKPSKRSFIEDLLFNKVTLADAGFIKQYGDCLGDIAARDLICAQKFNGLTVLPPLLTDEMIAQYTSALLAGTITSGWTFGAGAALQIPFAMQMAYRFNGIGVTQNVLYENQKLIANQFNSAIGKIQDSLSSTASALGKLQDVVNQNAQALNTLVKQLSSNFGAISSVLNDILSRLDPPEAEVQIDRLITGRLQSLQTYVTQQLIRAAEIRASANLAATKMSECVLGQSKRVDFCGKGYHLMSFPQSAPHGVVFLHVTYVPAQEKNFTTAPAICHDGKAHFPREGVFVSNGTHWFVTQRNFYEPQIITTDNTFVSGNCDVVIGIVNNTVYDPLQPELDSFKEELDKYFKNHTSPDVDLGDISGINASVVNIQKEIDRLNEVAKNLNESLIDLQELGKYEQYIKWPWYIWLGFIAGLIAIVMVTIMLCCMTSCCSCLKGCCSCGSCCKFDEDDSEPVLKGVKLHYT

SEQ ID NO: 148 - DNA, 3804 bp, synthetic construct
  misc_feature 1..3804: note = modified coronavirus S polypeptide
  source 1..3804: mol_type = other DNA
atgttcgtcttcctggtgctgctgcctctggtgtccagccagtgcgtgaacttcaccactaggactcagctgcctcccgcttacaccaactcattcactaggggtgtgtactacccagacaaggtcttccgctcctcagtgctgcactcaactcaggacctgttcctgcctttcttctccaacgtcacctggttccacgctatccacgtgtccggcaccaacggcactaagaggttcgccaaccccgtgctgccattcaacgacggagtctacttcgcttcaaccgagaagtccaacatcatcagaggatggatcttcggcaccactctggacagcaagactcagtctctgctgatcgtcaacaacgctaccaacgtggtcatcaaggtgtgcgaattccagttctgtaacgaccccttcctgggtgtctactaccacaagaacaacaagtcatggatggagtccgaattccgcgtctactccagcgctaacaactgcactttcgagtacgtgtcccagccattcctgatggacctggaaggaaagcagggtaacttcaagaacctgcgcgagttcgtgttcaagaacatcgacggctacttcaagatttacagcaagcacacccccatcaacctggtccgtggcctgccacagggattctctgctctggagcccctggtggacctgccaatcggcatcaacatcaccaggttccagactctgcacagatcctacctgactcccggagactcttcatccggttggaccgctggcgctgccgcttactacgtgggttacctgcagccacgcaccttcctgctgaagtacaacgaaaacggcaccatcactgacgccgtcgactgcgctctggacccactgtcagaaaccaagtgcactctgaagtccttcaccgtggagaagggaatctaccagacttcaaacttccgcgtgcagcctaccgaatccatcgtccgtttcccaaacatcactaacctgtgccctttcggagaggtcttcaacgccacccgcttcgcttccgtgtacgcctggaaccgcaagcgtatctcaaactgcgtcgctgactactccgtgctgtacaactcagcctccttcagcaccttcaagtgctacggagtgtcacccactaagctgaacgacctgtgcttcaccaacgtctacgctgactccttcgtgatccgcggtgacgaggtccgtcagatcgctccaggccagactggaaacatcgccgactacaactacaagctgcctgacgacttcaccggttgcgtcatcgcctggaacagcaacaacctggactctaaagtgggtggcaactacaactacctgtacaggctgttcagaaagtcaaacctgaagcccttcgagcgcgacatcagcactgaaatctaccaggctggttctaccccatgcaacggtgtcaagggcttcaactgctacttccctctgcagtcctacggcttccagcccacttacggtgtgggctaccagccataccgtgtggtcgtgctgagcttcgagctgctgcacgcccctgctactgtgtgcggacccaagaagtctaccaacctggtcaagaacaagtgcgtgaacttcaacttcaacggtctgaccggaactggtgtcctgaccgagagcaacaagaagttcctgcctttccagcagttcggtcgcgacatcgctgacaccactgacgccgtgcgtgaccctcagaccctggaaatcctggacatcactccctgctcattcggaggtgtctccgtgatcactcccggaaccaacacttctaaccaggtcgctgtgctgtaccagggtgtgaactgcaccgaagtcccagtggccatccacgctgaccagctgacccctacttggagggtgtactccaccggcagcaacgtcttccagactagagctggatgcctgatcggtgccgagcacgtcaacaacagctacgaatgcgacatccctatcggcgctggaatctgcgcctcttaccagacccagactaacagcccaggtggttctgtggcctctcagtcaatcatcgcctacaccatgtcactgggtgtcgaaaactccgtggcttactctaacaactcaatcgccatccctaccaacttcactatcagcgtgaccactgagatcctgcccgtcagcatgaccaagacttctgtggactgcactatgtacatctgcggcgacagcaccgaatgctctaacctgctgctgcagtacggttctttctgcacccagctgaaccgcgctctgactggcatcgccgtggagcaggacaagaacactcaggaagtcttcgctcaggtgaagcaaatctacaagaccccacctatcaaggacttcggcggattcaacttctcccagatcctgccagacccttccaagcccagcaagaggtctttcatcgaggacctgctgttcaacaaggtcactctggccgacgctggtttcatcaagcagtacggcgactgcctgggagacatcgctgctcgcgacctgatctgcgcccagaagttcaacggcctgaccgtgctgcccccactgctgactgacgaaatgatcgctcagtacactagcgccctgctggctggcaccatcacttcaggttggactttcggtgctggtgctgctctgcagatcccattcgctatgcagatggcctaccgtttcaacggaatcggtgtcacccagaacgtgctgtacgagaaccagaagctgatcgctaaccagttcaactcagccatcggcaagatccaggacagcctgagctctactgcctctgctctgggaaagctgcaggacgtcgtgaaccagaacgcccaggctctgaacaccctggtcaagcagctgtcatccaacttcggcgccatcagctctgtgctgaacgacatcctgtccaggctggaccctcccgaggctgaagtccagatcgacaggctgatcactggaagactgcagtcactgcagacctacgtgactcagcagctgatccgcgccgctgaaatccgtgcctccgctaacctggccgctaccaagatgagcgagtgcgtcctgggccagtctaagagagtggacttctgcggcaagggataccacctgatgtcattcccacagtccgcccctcacggagtcgtgttcctgcacgtcacctacgtgcccgctcaggagaagaacttcaccactgccccagctatctgccacgacggcaaggctcacttccctcgcgaaggagtcttcgtgagcaacggcacccactggttcgtcactcagcgtaacttctacgagccccagatcatcaccactgacaacactttcgtgtctggcaactgcgacgtggtcatcggtatcgtcaacaacaccgtgtacgaccctctgcagcccgagctggactcattcaaggaagagctggacaagtacttcaagaaccacacctcccctgacgtcgacctgggtgacatctcaggcatcaacgcctccgtcgtgaacatccagaaggagatcgaccgcctgaacgaagtggctaagaacctgaacgaaagcctgatcgacctgcaggagctgggcaagtacgaacagtacatcaagtggccatggtacatctggctgggattcatcgctggcctcatcgctatcgtgatggtgaccatcatgctgtgctgcatgacttcatgctgctcctgcctgaagggttgctgcagctgcggctcttgctgcaagttcgacgaggacgactctgaacctgtcctgaagggagtgaagctgcactacacc

SEQ ID NO: 149 - protein, 1273 aa, synthetic construct
  REGION 1..1273: note = modified coronavirus S polypeptide
MFVFLVLLPLVSSQCVNFTNRTQLPSAYTNSFTRGVYYPDKVFRSSVLHSTQDLFLPFFSNVTWFHAIHVSGTNGTKRFDNPVLPFNDGVYFASTEKSNIIRGWIFGTTLDSKTQSLLIVNNATNVVIKVCEFQFCNYPFLGVYYHKNNKSWMESEFRVYSSANNCTFEYVSQPFLMDLEGKQGNFKNLSEFVFKNIDGYFKIYSKHTPINLVRDLPQGFSALEPLVDLPIGINITRFQTLLALHRSYLTPGDSSSGWTAGAAAYYVGYLQPRTFLLKYNENGTITDAVDCALDPLSETKCTLKSFTVEKGIYQTSNFRVQPTESIVRFPNITNLCPFGEVFNATRFASVYAWNRKRISNCVADYSVLYNSASFSTFKCYGVSPTKLNDLCFTNVYADSFVIRGDEVRQIAPGQTGTIADYNYKLPDDFTGCVIAWNSNNLDSKVGGNYNYLYRLFRKSNLKPFERDISTEIYQAGSTPCNGVKGFNCYFPLQSYGFQPTYGVGYQPYRVVVLSFELLHAPATVCGPKKSTNLVKNKCVNFNFNGLTGTGVLTESNKKFLPFQQFGRDIADTTDAVRDPQTLEILDITPCSFGGVSVITPGTNTSNQVAVLYQGVNCTEVPVAIHADQLTPTWRVYSTGSNVFQTRAGCLIGAEYVNNSYECDIPIGAGICASYQTQTNSPQQAQSVASQSIIAYTMSLGAENSVAYSNNSIAIPTNFTISVTTEILPVSMTKTSVDCTMYICGDSTECSNLLLQYGSFCTQLNRALTGIAVEQDKNTQEVFAQVKQIYKTPPIKDFGGFNFSQILPDPSKPSKRSFIEDLLFNKVTLADAGFIKQYGDCLGDIAARDLICAQKFNGLTVLPPLLTDEMIAQYTSALLAGTITSGWTFGAGAALQIPFAMQMAYRFNGIGVTQNVLYENQKLIANQFNSAIGKIQDSLSSTASALGKLQDVVNQNAQALNTLVKQLSSNFGAISSVLNDILSRLDPPEAEVQIDRLITGRLQSLQTYVTQQLIRAAEIRASANLAAIKMSECVLGQSKRVDFCGKGYHLMSFPQSAPHGVVFLHVTYVPAQEKNFTTAPAICHDGKAHFPREGVFVSNGTHWFVTQRNFYEPQIITTDNTFVSGNCDVVIGIVNNTVYDPLQPELDSFKEELDKYFKNHTSPDVDLGDISGINASFVNIQKEIDRLNEVAKNLNESLIDLQELGKYEQYIKWPWYIWLGFIAGLIAIVMVTIMLCCMTSCCSCLKGCCSCGSCCKFDEDDSEPVLKGVKLHYT

SEQ ID NO: 150 - DNA, 3822 bp, synthetic construct
  misc_feature 1..3822: note = modified coronavirus S polypeptide
  source 1..3822: mol_type = other DNA
atgttcgtcttcctggtgctgctgcctctggtgtccagccagtgcgtgaacttcaccaaccgcactcagctgcctagcgcttacaccaactctttcactaggggtgtgtactaccccgacaaggtcttccgctcctcagtgctgcactctactcaggacctgttcctgcccttcttctctaacgtcacctggttccacgccatccacgtgagcggcaccaacggcactaagaggttcgacaacccagtgctgcctttcaacgacggtgtctacttcgcttcaaccgagaagtccaacatcatcagaggatggatcttcggcaccactctggacagcaagactcagtctctgctgatcgtcaacaacgccaccaacgtggtcatcaaggtgtgcgaattccagttctgcaactacccattcctgggcgtctactaccacaagaacaacaagtcatggatggagtccgaattccgcgtctactccagcgctaacaactgcactttcgagtacgtgtcccagcctttcctgatggacctggaaggaaagcagggtaacttcaagaacctgtcagagttcgtgttcaagaacatcgacggatacttcaagatttactccaagcacaccccaatcaacctggtccgtgacctgcctcagggtttctcagctctggagccactggtggacctgcctatcggcatcaacatcaccaggttccagactctgctggctctgcacagatcctacctgactccaggtgactcatcttctggatggactgctggagctgctgcttactacgtgggttacctgcagcctcgcaccttcctgctgaagtacaacgaaaacggcaccatcactgacgccgtcgactgcgctctggaccctctgagcgaaaccaagtgcactctgaagtctttcaccgtggagaagggtatctaccagactagcaacttccgcgtgcagcccaccgaatctatcgtccgtttccctaacatcactaacctgtgccccttcggcgaggtcttcaacgccacccgtttcgcttccgtgtacgcctggaaccgcaagcgtatcagcaactgcgtcgctgactactctgtgctgtacaactcagcctccttcagcactttcaagtgctacggtgtgagccctactaagctgaacgacctgtgcttcaccaacgtctacgccgactctttcgtgatccgcggcgacgaggtccgtcagatcgctccaggccagaccggaactatcgccgactacaactacaagctgcctgacgacttcaccggctgcgtcatcgcttggaactcaaacaacctggactccaaagtgggtggcaactacaactacctgtacaggctgttcagaaagtcaaacctgaagcccttcgagagggacatctcaactgaaatctaccaggccggctccaccccatgcaacggtgtcaagggcttcaactgctacttccccctgcagtcctacggattccagccaacttacggtgtgggctaccagccttacagagtggtcgtgctgtcattcgaactcctccacgctcctgctactgtgtgcggaccaaagaagtccaccaacctggtcaagaacaagtgcgtgaacttcaacttcaacggtctgaccggaactggtgtcctgaccgagtcaaacaagaagttcctgcccttccagcagttcggtcgcgacatcgctgacactaccgacgccgtgcgtgacccccagaccctggaaatcctggacatcactccatgcagcttcggaggtgtctctgtgatcactccaggaaccaacacttccaaccaggtcgctgtgctgtaccagggtgtcaactgcaccgaagtccctgtggccatccacgctgaccagctgacccccacttggagggtgtactccaccggcagcaacgtcttccagactagagctggttgcctgatcggcgccgagtacgtgaacaactcatacgaatgcgacatccctatcggcgctggaatctgcgcctcctaccagacccagactaactcaccccagcaggctcagtccgtcgcctctcagtcaatcatcgcttacaccatgagcctgggcgctgaaaactctgtggcctactctaacaactcaatcgccatccccaccaacttcactatcagcgtgaccactgagatcctgccagtctcaatgaccaagacttccgtggactgcactatgtacatctgcggagacagcaccgaatgctctaacctgctgctgcagtacggctctttctgcacccagctgaacagggctctgactggaatcgccgtggagcaggacaagaacactcaggaagtcttcgctcaggtgaagcaaatctacaagacccctcccatcaaggacttcggcggattcaacttctcccagatcctgcctgacccctccaagcccagcaagcgctctttcatcgaggacctgctgttcaacaaggtcaccctggccgacgctggcttcatcaagcagtacggagactgcctgggtgacatcgccgctcgtgacctgatctgcgctcagaagttcaacggactgaccgtgctgccacctctgctgactgacgaaatgatcgcccagtacacttcagccctgctggctggaaccatcacttctggttggaccttcggtgctggtgctgctctgcagatcccattcgctatgcagatggcctaccgcttcaacggaatcggtgtcacccagaacgtgctgtacgagaaccagaagctgatcgctaaccagttcaacagcgccatcggcaagatccaggactcactgagctctactgcctccgctctgggaaagctgcaggacgtcgtgaaccagaacgcccaggctctgaacaccctggtcaagcagctgtcatccaacttcggagctatcagctctgtgctgaacgacatcctctcccgcctggaccctcctgaggctgaagtccagatcgacaggctgatcactggtagactgcagagcctgcagacctacgtgactcagcagctgatccgcgccgctgaaatccgtgcctctgctaacctggctgctatcaagatgtcagagtgcgtcctgggacagtccaagagagtggacttctgcggcaagggataccacctgatgtcattccctcagtccgctccccacggtgtcgtgttcctgcacgtcacctacgtgccagcccaggagaagaacttcaccactgcccctgctatctgccacgacggcaaggctcacttcccccgcgaaggtgtcttcgtgagcaacggcacccactggttcgtcactcagcgtaacttctacgagccacagatcatcaccactgacaacactttcgtgtctggaaactgcgacgtggtcatcggtatcgtcaacaacaccgtgtacgaccccctgcagccagagctggacagcttcaaggaagagctggacaagtacttcaagaaccacacctctcccgacgtggacctgggcgacatcagcggaatcaacgcttctttcgtcaacatccagaaggagatcgaccgtctgaacgaagtggccaagaacctgaacgaatcactgatcgacctgcaggagctgggcaagtacgaacagtacatcaagtggccatggtacatctggctgggtttcatcgctggcctcatcgctatcgtgatggtgaccatcatgctgtgctgcatgacttcatgctgctcctgcctgaagggctgctgcagctgcggatcttgctgcaagttcgacgaggacgactccgaacctgtcctgaagggagtgaagctgcactacacctaa

SEQ ID NO: 151 - protein, 1260 aa, synthetic construct
  REGION 1..1260: note = modified coronavirus S polypeptide
QCVNFTNRTQLPSAYTNSFTRGVYYPDKVFRSSVLHSTQDLFLPFFSNVTWFHAIHVSGTNGTKRFDNPVLPFNDGVYFASTEKSNIIRGWIFGTTLDSKTQSLLIVNNATNVVIKVCEFQFCNYPFLGVYYHKNNKSWMESEFRVYSSANNCTFEYVSQPFLMDLEGKQGNFKNLSEFVFKNIDGYFKIYSKHTPINLVRDLPQGFSALEPLVDLPIGINITRFQTLLALHRSYLTPGDSSSGWTAGAAAYYVGYLQPRTFLLKYNENGTITDAVDCALDPLSETKCTLKSFTVEKGIYQTSNFRVQPTESIVRFPNITNLCPFGEVFNATRFASVYAWNRKRISNCVADYSVLYNSASFSTFKCYGVSPTKLNDLCFTNVYADSFVIRGDEVRQIAPGQTGTIADYNYKLPDDFTGCVIAWNSNNLDSKVGGNYNYLYRLFRKSNLKPFERDISTEIYQAGSTPCNGVKGFNCYFPLQSYGFQPTYGVGYQPYRVVVLSFELLHAPATVCGPKKSTNLVKNKCVNFNFNGLTGTGVLTESNKKFLPFQQFGRDIADTTDAVRDPQTLEILDITPCSFGGVSVITPGTNTSNQVAVLYQGVNCTEVPVAIHADQLTPTWRVYSTGSNVFQTRAGCLIGAEYVNNSYECDIPIGAGICASYQTQTNSPQQAQSVASQSIIAYTMSLGAENSVAYSNNSIAIPTNFTISVTTEILPVSMTKTSVDCTMYICGDSTECSNLLLQYGSFCTQLNRALTGIAVEQDKNTQEVFAQVKQIYKTPPIKDFGGFNFSQILPDPSKPSKRSFIEDLLFNKVTLADAGFIKQYGDCLGDIAARDLICAQKFNGLTVLPPLLTDEMIAQYTSALLAGTITSGWTFGAGAALQIPFAMQMAYRFNGIGVTQNVLYENQKLIANQFNSAIGKIQDSLSSTASALGKLQDVVNQNAQALNTLVKQLSSNFGAISSVLNDILSRLDPPEAEVQIDRLITGRLQSLQTYVTQQLIRAAEIRASANLAAIKMSECVLGQSKRVDFCGKGYHLMSFPQSAPHGVVFLHVTYVPAQEKNFTTAPAICHDGKAHFPREGVFVSNGTHWFVTQRNFYEPQIITTDNTFVSGNCDVVIGIVNNTVYDPLQPELDSFKEELDKYFKNHTSPDVDLGDISGINASFVNIQKEIDRLNEVAKNLNESLIDLQELGKYEQYIKWPWYIWLGFIAGLIAIVMVTIMLCCMTSCCSCLKGCCSCGSCCKFDEDDSEPVLKGVKLHYT

SEQ ID NO: 152 - protein, 1273 aa, synthetic construct
  REGION 1..1273: note = modified coronavirus S polypeptide
MFVFLVLLPLVSIQCVNLTTRTQLPPAYTNSFTRGVYYPDKVFRSSVLHSTQDLFLPFFSNVTWFHAIHVSGTNGTKRFDNPVLPFNDGVYFASTEKSNIIRGWIFGTTLDSKTQSLLIVNNATNVVIKVCEFQFCNDPFLGVYYHKNNKSCMESEFRVYSSANNCTFEYVSQPFLMDLEGKQGNFKNLREFVFKNIDGYFKIYSKHTPINLVRDLPQGFSALEPLVDLPIGINITRFQTLLALHRSYLTPGDSSSGWTAGAAAYYVGYLQPRTFLLKYNENGTITDAVDCALDPLSETKCTLKSFTVEKGIYQTSNFRVQPTESIVRFPNITNLCPFGEVFNATRFASVYAWNRKRISNCVADYSVLYNSASFSTFKCYGVSPTKLNDLCFTNVYADSFVIRGDEVRQIAPGQTGKIADYNYKLPDDFTGCVIAWNSNNLDSKVGGNYNYRYRLFRKSNLKPFERDISTEIYQAGSTPCNGVEGFNCYFPLQPYGFQPTNGVGYQPYRVVVLSFELLHAPATVCGPKKSTNLVKNKCVNFNFNGLTGTGVLTESNKKFLPFQQFGRDIADTTDAVRDPQTLEILDITPCSFGGVSVITPGTNTSNQVAVLYQGVNCTEVPVAIHADQLTPTWRVYSTGSNVFQTRAGCLIGAEHVNNSYECDIPIGAGICASYQTQTNSPQQAQSVASQSIIAYTMSLGAENSVAYSNNSIAIPTNFTISVTTEILPVSMTKTSVDCTMYICGDSTECSNLLLQYGSFCTQLNRALTGIAVEQDKNTQEVFAQVKQIYKTPPIKDFGGFNFSQILPDPSKPSKRSFIEDLLFNKVTLADAGFIKQYGDCLGDIAARDLICAQKFNGLTVLPPLLTDEMIAQYTSALLAGTITSGWTFGAGAALQIPFAMQMAYRFNGIGVTQNVLYENQKLIANQFNSAIGKIQDSLSSTASALGKLQDVVNQNAQALNTLVKQLSSNFGAISSVLNDILSRLDPPEAEVQIDRLITGRLQSLQTYVTQQLIRAAEIRASANLAATKMSECVLGQSKRVDFCGKGYHLMSFPQSAPHGVVFLHVTYVPAQEKNFTTAPAICHDGKAHFPREGVFVSNGTHWFVTQRNFYEPQIITTDNTFVSGNCDVVIGIVNNTVYDPLQPELDSFKEELDKYFKNHTSPDVDLGDISGINASVVNIQKEIDRLNEVAKNLNESLIDLQELGKYEQYIKWPWYIWLGFIAGLIAIVMVTIMLCCMTSCCSCLKGCCSCGSCCKFDEDDSEPVLKGVKLHYT

SEQ ID NO: 153 - protein, 1260 aa, synthetic construct
  REGION 1..1260: note = modified coronavirus S polypeptide
QCVNLTTRTQLPPAYTNSFTRGVYYPDKVFRSSVLHSTQDLFLPFFSNVTWFHAIHVSGTNGTKRFDNPVLPFNDGVYFASTEKSNIIRGWIFGTTLDSKTQSLLIVNNATNVVIKVCEFQFCNDPFLGVYYHKNNKSCMESEFRVYSSANNCTFEYVSQPFLMDLEGKQGNFKNLREFVFKNIDGYFKIYSKHTPINLVRDLPQGFSALEPLVDLPIGINITRFQTLLALHRSYLTPGDSSSGWTAGAAAYYVGYLQPRTFLLKYNENGTITDAVDCALDPLSETKCTLKSFTVEKGIYQTSNFRVQPTESIVRFPNITNLCPFGEVFNATRFASVYAWNRKRISNCVADYSVLYNSASFSTFKCYGVSPTKLNDLCFTNVYADSFVIRGDEVRQIAPGQTGKIADYNYKLPDDFTGCVIAWNSNNLDSKVGGNYNYRYRLFRKSNLKPFERDISTEIYQAGSTPCNGVEGFNCYFPLQPYGFQPTNGVGYQPYRVVVLSFELLHAPATVCGPKKSTNLVKNKCVNFNFNGLTGTGVLTESNKKFLPFQQFGRDIADTTDAVRDPQTLEILDITPCSFGGVSVITPGTNTSNQVAVLYQGVNCTEVPVAIHADQLTPTWRVYSTGSNVFQTRAGCLIGAEHVNNSYECDIPIGAGICASYQTQTNSPQQAQSVASQSIIAYTMSLGAENSVAYSNNSIAIPTNFTISVTTEILPVSMTKTSVDCTMYICGDSTECSNLLLQYGSFCTQLNRALTGIAVEQDKNTQEVFAQVKQIYKTPPIKDFGGFNFSQILPDPSKPSKRSFIEDLLFNKVTLADAGFIKQYGDCLGDIAARDLICAQKFNGLTVLPPLLTDEMIAQYTSALLAGTITSGWTFGAGAALQIPFAMQMAYRFNGIGVTQNVLYENQKLIANQFNSAIGKIQDSLSSTASALGKLQDVVNQNAQALNTLVKQLSSNFGAISSVLNDILSRLDPPEAEVQIDRLITGRLQSLQTYVTQQLIRAAEIRASANLAATKMSECVLGQSKRVDFCGKGYHLMSFPQSAPHGVVFLHVTYVPAQEKNFTTAPAICHDGKAHFPREGVFVSNGTHWFVTQRNFYEPQIITTDNTFVSGNCDVVIGIVNNTVYDPLQPELDSFKEELDKYFKNHTSPDVDLGDISGINASVVNIQKEIDRLNEVAKNLNESLIDLQELGKYEQYIKWPWYIWLGFIAGLIAIVMVTIMLCCMTSCCSCLKGCCSCGSCCKFDEDDSEPVLKGVKLHYT

SEQ ID NO: 154 - protein, 13 aa, synthetic construct
  REGION 1..13: note = N-terminal signal peptide
MFVFFVLLPLVSS

SEQ ID NO: 155 - protein, 1273 aa, synthetic construct
  REGION 1..1273: note = modified coronavirus S polypeptide
MFVFFVLLPLVSSQCVNLTTRTQLPPAYTNSFTRGVYYPDKVFRSSVLHSTQDLFLPFFSNVTWFHAIHVSGTNGTKRFDNPVLPFNDGVYFASIEKSNIIRGWIFGTTLDSKTQSLLIVNNATNVVIKVCEFQFCNDPFLGVYYHKNNKSWMESEFRVYSSANNCTFEYVSQPFLMDLEGKQGNFKNLREFVFKNIDGYFKIYSKHTPINLVRDLPQGFSALEPLVDLPIGINITRFQTLLALHRSYLTPGGSSSGWTAGAAAYYVGYLQPRTFLLKYNENGTITDAVDCALDPLSETKCTLKSFTVEKGIYQTSNFRVQPTESIVRFPNITNLCPFGEVFNATRFASVYAWNRKRISNCVADYSVLYNSASFSTFKCYGVSPTKLNDLCFTNVYADSFVIRGDEVRQIAPGQTGKIADYNYKLPDDFTGCVIAWNSNNLDSKVGGNYNYLYRLFRKSNLKPFERDISTEIYQAGSTPCNGVKGFNCYFPLQSYGFQPTNGVGYQPYRVVVLSFELLHAPATVCGPKKSTNLVKNKCVNFNFNGLTGTGVLTESNKKFLPFQQFGRDIADTTDAVRDPQTLEILDITPCSFGGVSVITPGTNTSNQVAVLYQGVNCTEVPVAIHADQLTPTWRVYSTGSNVFQTRAGCLIGAEHVNNSYECDIPIGAGICASYQTQTNSPQQAQSVASQSIIAYTMSLGVENSVAYSNNSIAIPTNFTISVTTEILPVSMTKTSVDCTMYICGDSTECSNLLLQYGSFCTQLNRALTGIAVEQDKNTQEVFAQVKQIYKTPPIKDFGGFNFSQILPDPSKPSKRSFIEDLLFNKVTLADAGFIKQYGDCLGDIAARDLICAQKFNGLTVLPPLLTDEMIAQYTSALLAGTITSGWTFGAGAALQIPFAMQMAYRFNGIGVTQNVLYENQKLIANQFNSAIGKIQDSLSSTASALGKLQDVVNQNAQALNTLVKQLSSNFGAISSVLNDILSRLDPPEAEVQIDRLITGRLQSLQTYVTQQLIRAAEIRASANLAATKMSECVLGQSKRVDFCGKGYHLMSFPQSAPHGVVFLHVTYVPAQEKNFTTAPAICHDGKAHFPREGVFVSNGTHWFVTQRNFYEPQIITTDNTFVSGNCDVVIGIVNNTVYDPLQPELDSFKEELDKYFKNHTSPDVDLGDISGINASVVNIQKEIDRLNEVAKNLNESLIDLQELGKYEQYIKWPWYIWLGFIAGLIAIVMVTIMLCCMTSCCSCLKGCCSCGSCCKFDEDDSEPVLKGVKLHYT

SEQ ID NO: 156 - protein, 1260 aa, synthetic construct
  REGION 1..1260: note = modified coronavirus S polypeptide
QCVNLTTRTQLPPAYTNSFTRGVYYPDKVFRSSVLHSTQDLFLPFFSNVTWFHAIHVSGTNGTKRFDNPVLPFNDGVYFASIEKSNIIRGWIFGTTLDSKTQSLLIVNNATNVVIKVCEFQFCNDPFLGVYYHKNNKSWMESEFRVYSSANNCTFEYVSQPFLMDLEGKQGNFKNLREFVFKNIDGYFKIYSKHTPINLVRDLPQGFSALEPLVDLPIGINITRFQTLLALHRSYLTPGGSSSGWTAGAAAYYVGYLQPRTFLLKYNENGTITDAVDCALDPLSETKCTLKSFTVEKGIYQTSNFRVQPTESIVRFPNITNLCPFGEVFNATRFASVYAWNRKRISNCVADYSVLYNSASFSTFKCYGVSPTKLNDLCFTNVYADSFVIRGDEVRQIAPGQTGKIADYNYKLPDDFTGCVIAWNSNNLDSKVGGNYNYLYRLFRKSNLKPFERDISTEIYQAGSTPCNGVKGFNCYFPLQSYGFQPTNGVGYQPYRVVVLSFELLHAPATVCGPKKSTNLVKNKCVNFNFNGLTGTGVLTESNKKFLPFQQFGRDIADTTDAVRDPQTLEILDITPCSFGGVSVITPGTNTSNQVAVLYQGVNCTEVPVAIHADQLTPTWRVYSTGSNVFQTRAGCLIGAEHVNNSYECDIPIGAGICASYQTQTNSPQQAQSVASQSIIAYTMSLGVENSVAYSNNSIAIPTNFTISVTTEILPVSMTKTSVDCTMYICGDSTECSNLLLQYGSFCTQLNRALTGIAVEQDKNTQEVFAQVKQIYKTPPIKDFGGFNFSQILPDPSKPSKRSFIEDLLFNKVTLADAGFIKQYGDCLGDIAARDLICAQKFNGLTVLPPLLTDEMIAQYTSALLAGTITSGWTFGAGAALQIPFAMQMAYRFNGIGVTQNVLYENQKLIANQFNSAIGKIQDSLSSTASALGKLQDVVNQNAQALNTLVKQLSSNFGAISSVLNDILSRLDPPEAEVQIDRLITGRLQSLQTYVTQQLIRAAEIRASANLAATKMSECVLGQSKRVDFCGKGYHLMSFPQSAPHGVVFLHVTYVPAQEKNFTTAPAICHDGKAHFPREGVFVSNGTHWFVTQRNFYEPQIITTDNTFVSGNCDVVIGIVNNTVYDPLQPELDSFKEELDKYFKNHTSPDVDLGDISGINASVVNIQKEIDRLNEVAKNLNESLIDLQELGKYEQYIKWPWYIWLGFIAGLIAIVMVTIMLCCMTSCCSCLKGCCSCGSCCKFDEDDSEPVLKGVKLHYT

SEQ ID NO: 157 - protein, 1273 aa, synthetic construct
  REGION 1..1273: note = modified coronavirus S polypeptide
MFVFFVLLPLVSSQCVNLTTRTQLPPAYTNSFTRGVYYPDKVFRSSVLHSTQDLFLPFFSNVTWFHAIHVSGTNGTKRFDNPVLPFNDGVYFASIEKSNIIRGWIFGTTLDSKTQSLLIVNNATNVVIKVCEFQFCNDPFLGVYYHKNNKSWMESEFRVYSSANNCTFEYVSQPFLMDLEGKQGNFKNLREFVFKNIDGYFKIYSKHTPINLVRDLPQGFSALEPLVDLPIGINITRFQTLLALHRSYLTPGGSSSGWTAGAAAYYVGYLQPRTFLLKYNENGTITDAVDCALDPLSETKCTLKSFTVEKGIYQTSNFRVQPTESIVRFPNITNLCPFGEVFNATRFASVYAWNRKRISNCVADYSVLYNSASFSTFKCYGVSPTKLNDLCFTNVYADSFVIRGDEVRQIAPGQTGKIADYNYKLPDDFTGCVIAWNSNNLDSKVGGNYNYLYRLFRKSNLKPFERDISTEIYQAGNTPCNGVEGFNCYFPLQSYGFQPTNGVGYQPYRVVVLSFELLHAPATVCGPKKSTNLVKNKCVNFNFNGLTGTGVLTESNKKFLPFQQFGRDIADTTDAVRDPQTLEILDITPCSFGGVSVITPGTNTSNQVAVLYQGVNCTEVPVAIHADQLTPTWRVYSTGSNVFQTRAGCLIGAEHVNNSYECDIPIGAGICASYQTQTNSPQQAQSVASQSIIAYTMSLGVENSVAYSNNSIAIPTNFTISVTTEILPVSMTKTSVDCTMYICGDSTECSNLLLQYGSFCTQLNRALTGIAVEQDKNTQEVFAQVKQIYKTPPIKDFGGFNFSQILPDPSKPSKRSFIEDLLFNKVTLADAGFIKQYGDCLGDIAARDLICAQKFNGLTVLPPLLTDEMIAQYTSALLAGTITSGWTFGAGAALQIPFAMQMAYRFNGIGVTQNVLYENQKLIANQFNSAIGKIQDSLSSTASALGKLQDVVNQNAQALNTLVKQLSSNFGAISSVLNDILSRLDPPEAEVQIDRLITGRLQSLQTYVTQQLIRAAEIRASANLAATKMSECVLGQSKRVDFCGKGYHLMSFPQSAPHGVVFLHVTYVPAQEKNFTTAPAICHDGKAHFPREGVFVSNGTHWFVTQRNFYEPQIITTDNTFVSGNCDVVIGIVNNTVYDPLQPELDSFKEELDKYFKNHTSPDVDLGDISGINASVVNIQKEIDRLNEVAKNLNESLIDLQELGKYEQYIKWPWYIWLGFIAGLIAIVMVTIMLCCMTSCCSCLKGCCSCGSCCKFDEDDSEPVLKGVKLHYT

SEQ ID NO: 158 - protein, 1260 aa, synthetic construct
  REGION 1..1260: note = modified coronavirus S polypeptide
QCVNLTTRTQLPPAYTNSFTRGVYYPDKVFRSSVLHSTQDLFLPFFSNVTWFHAIHVSGTNGTKRFDNPVLPFNDGVYFASIEKSNIIRGWIFGTTLDSKTQSLLIVNNATNVVIKVCEFQFCNDPFLGVYYHKNNKSWMESEFRVYSSANNCTFEYVSQPFLMDLEGKQGNFKNLREFVFKNIDGYFKIYSKHTPINLVRDLPQGFSALEPLVDLPIGINITRFQTLLALHRSYLTPGGSSSGWTAGAAAYYVGYLQPRTFLLKYNENGTITDAVDCALDPLSETKCTLKSFTVEKGIYQTSNFRVQPTESIVRFPNITNLCPFGEVFNATRFASVYAWNRKRISNCVADYSVLYNSASFSTFKCYGVSPTKLNDLCFTNVYADSFVIRGDEVRQIAPGQTGKIADYNYKLPDDFTGCVIAWNSNNLDSKVGGNYNYLYRLFRKSNLKPFERDISTEIYQAGNTPCNGVEGFNCYFPLQSYGFQPTNGVGYQPYRVVVLSFELLHAPATVCGPKKSTNLVKNKCVNFNFNGLTGTGVLTESNKKFLPFQQFGRDIADTTDAVRDPQTLEILDITPCSFGGVSVITPGTNTSNQVAVLYQGVNCTEVPVAIHADQLTPTWRVYSTGSNVFQTRAGCLIGAEHVNNSYECDIPIGAGICASYQTQTNSPQQAQSVASQSIIAYTMSLGVENSVAYSNNSIAIPTNFTISVTTEILPVSMTKTSVDCTMYICGDSTECSNLLLQYGSFCTQLNRALTGIAVEQDKNTQEVFAQVKQIYKTPPIKDFGGFNFSQILPDPSKPSKRSFIEDLLFNKVTLADAGFIKQYGDCLGDIAARDLICAQKFNGLTVLPPLLTDEMIAQYTSALLAGTITSGWTFGAGAALQIPFAMQMAYRFNGIGVTQNVLYENQKLIANQFNSAIGKIQDSLSSTASALGKLQDVVNQNAQALNTLVKQLSSNFGAISSVLNDILSRLDPPEAEVQIDRLITGRLQSLQTYVTQQLIRAAEIRASANLAATKMSECVLGQSKRVDFCGKGYHLMSFPQSAPHGVVFLHVTYVPAQEKNFTTAPAICHDGKAHFPREGVFVSNGTHWFVTQRNFYEPQIITTDNTFVSGNCDVVIGIVNNTVYDPLQPELDSFKEELDKYFKNHTSPDVDLGDISGINASVVNIQKEIDRLNEVAKNLNESLIDLQELGKYEQYIKWPWYIWLGFIAGLIAIVMVTIMLCCMTSCCSCLKGCCSCGSCCKFDEDDSEPVLKGVKLHYT

SEQ ID NO: 159 - protein, 1271 aa, synthetic construct
  REGION 1..1271: note = recombinant coronavirus Spike (S) polypeptide
MFVFLVLLPLVSSQCVNLTTRTQLPPAYTNSFTRGVYYPDKVFRSSVLHSTQDLFLPFFSNVTWFHVIHVSGTNGTKRFDNPVLPFNDGVYFASIEKSNIIRGWIFGTTLDSKTQSLLIVNNATNVVIKVCEFQFCNDPFLDVYYHKNNKSWMESEFRVYSSANNCTFEYVSQPFLMDLEGKQGNFKNLREFVFKNIDGYFKIYSKHTPINIVRDLPQGFSALEPLVDLPIGINITRFQTLLALHRSYLPGDSSSGWTAGAAAYYVGYLQPRTFLLKYNENGTITDAVDCALDPLSETKCTLKSFTVEKGIYQTSNFRVQPTESIVRFPNITNLCPFDEVFNATRFASVYAWNRKRISNCVADYSVLYNLAPFFTFKCYGVSPTKLNDLCFTNVYADSFVIRGDEVRQIAPGQTGNIADYNYKLPDDFTGCVIAWNSNKLDSKVSGNYNYLYRLFRKSNLKPFERDISTEIYQAGNKPCNGVAGFNCYFPLRSYSFRPTYGVGHQPYRVVVLSFELLHAPATVCGPKKSTNLVKNKCVNFNFNGLKGTGVLTESNKKFLPFQQFGRDIADTTDAVRDPQTLEILDITPCSFGGVSVITPGTNTSNQVAVLYQGVNCTEVPVAIHADQLTPTWRVYSTGSNVFQTRAGCLIGAEYVNNSYECDIPIGAGICASYQTQTKSHQQAQSVASQSIIAYTMSLGAENSVAYSNNSIAIPTNFTISVTTEILPVSMTKTSVDCTMYICGDSTECSNLLLQYGSFCTQLKRALTGIAVEQDKNTQEVFAQVKQIYKTPPIKYFGGFNFSQILPDPSKPSKRSFIEDLLFNKVTLADAGFIKQYGDCLGDIAARDLICAQKFKGLTVLPPLLTDEMIAQYTSALLAGTITSGWTFGAGAALQIPFAMQMAYRFNGIGVTQNVLYENQKLIANQFNSAIGKIQDSLSSTASALGKLQDVVNHNAQALNTLVKQLSSKFGAISSVLNDIFSRLDPPEAEVQIDRLITGRLQSLQTYVTQQLIRAAEIRASANLAATKMSECVLGQSKRVDFCGKGYHLMSFPQSAPHGVVFLHVTYVPAQEKNFTTAPAICHDGKAHFPREGVFVSNGTHWFVTQRNFYEPQIITTDNTFVSGNCDVVIGIVNNTVYDPLQPELDSFKELDKYFKNHTSPDVDLGDISGINASVVNIQKEIDRLNEVAKNLNESLIDLQELGKYEQYIKWPWYIWLGFIAGLIAIVMVTIMLCCMTSCCSCLKGCCSCGSCCKFDEDDSEPVLKGVKLHYT

SEQ ID NO: 160 - protein, 1270 aa, synthetic construct
  REGION 1..1270: note = recombinant coronavirus Spike (S) polypeptide
MFVFLVLLPLVSSQCVNLTTRTQLPPAYTNSFTRGVYYPDKVFRSSVLHSTQDLFLPFFSNVTWFHVISGTNGTKRFDNPVLPFNDGVYFASIEKSNIIRGWIFGTTLDSKTQSLLIVNNATNVVIKVCEFQFCNDPFLDHKNNKSWMESEFRVYSSANNCTFEYVSQPFLMDLEGKQGNFKNLREFVFKNIDGYFKIYSKHTPIIVREPEDLPQGFSALEPLVDLPIGINITRFQTLLALHRSYLTPGDSSSGWTAGAAAYYVGYLQPRTFLLKYNENGTITDAVDCALDPLSETKCTLKSFTVEKGIYQTSNFRVQPTESIVRFPNITNLCPFDEVFNATRFASVYAWNRKRISNCVADYSVLYNLAPFFTFKCYGVSPTKLNDLCFTNVYADSFVIRGDEVRQIAPGQTGNIADYNYKLPDDFTGCVIAWNSNKLDSKVSGNYNYLYRLFRKSNLKPFERDISTEIYQAGNKPCNGVAGFNCYFPLRSYSFRPTYGVGHQPYRVVVLSFELLHAPATVCGPKKSTNLVKNKCVNFNFNGLKGTGVLTESNKKFLPFQQFGRDIADTTDAVRDPQTLEILDITPCSFGGVSVITPGTNTSNQVAVLYQGVNCTEVPVAIHADQLTPTWRVYSTGSNVFQTRAGCLIGAEYVNNSYECDIPIGAGICASYQTQTKSHQQAQSVASQSIIAYTMSLGAENSVAYSNNSIAIPTNFTISVTTEILPVSMTKTSVDCTMYICGDSTECSNLLLQYGSFCTQLKRALTGIAVEQDKNTQEVFAQVKQIYKTPPIKYFGGFNFSQILPDPSKPSKRSFIEDLLFNKVTLADAGFIKQYGDCLGDIAARDLICAQKFKGLTVLPPLLTDEMIAQYTSALLAGTITSGWTFGAGAALQIPFAMQMAYRFNGIGVTQNVLYENQKLIANQFNSAIGKIQDSLSSTASALGKLQDVVNHNAQALNTLVKQLSSKFGAISSVLNDIFSRLDPPEAEVQIDRLITGRLQSLQTYVTQQLIRAAEIRASANLAATKMSECVLGQSKRVDFCGKGYHLMSFPQSAPHGVVFLHVTYVPAQEKNFTTAPAICHDGKAHFPREGVFVSNGTHWFVTQRNFYEPQIITTDNTFVSGNCDVVIGIVNNTVYDPLQPELDSFKEELDKYFKNHTSPDVDLGDISGINASVVNIQKEIDRLNEVAKNLNESLIDLQELGKYEQYIKWPWYIWLGFIAGLIAIVMVTIMLCCMTSCCSCLKGCCSCGSCCKFDEDDSEPVLKGVKLHYT

SEQ ID NO: 161 - DNA, 3819 bp, synthetic construct
  misc_feature 1..3819: note = encodes recombinant coronavirus Spike (S) polypeptide
  source 1..3819: mol_type = other DNA
atgtttgtattcttagtattgctgcccctagtgagcagccagtgtgttaatctgacgacgcggacccaacttcctccagcctacacaaactcttttacgcgcggggtctattacccggacaaagtgttccgttcgagtgttttgcatagcacccaggatttattcctaccattcttttcaaatgttacctggttccatgtgattcacgtctccggtactaatggaactaaacggttcgacaaccccgttttgccgttcaacgatggggtgtacttcgcttctattgagaagtcgaatatcatacgtgggtggattttcggcacgaccttggatagtaaaactcagtcgttacttatagtaaataatgctaccaatgttgtgattaaggtgtgtgagttccagttttgtaatgatccctttcttgacgtctattatcataaaaataacaaatcatggatggaatcggagtttcgggtgtattcctctgcgaacaactgtacatttgaatatgtgtctcagccgttcctgatggatttggagggtaagcaaggcaactttaagaatttgcgagagttcgtcttcaagaacatagatggatactttaaaatttatagcaagcacacaccgattaatatagtgcgagaccttcctcaaggtttctcggcccttgagccgctagtggacctgcccattggaattaatatcacccggtttcagactctgcttgcccttcatcgttcttatctgacccctggcgattcttcatcaggatggacggctggggctgccgcctattatgtcggataccttcaaccaaggacttttctcctcaagtataacgagaacggaacaattacagatgcagtcgattgcgccctagaccctctgtcggaaacgaagtgcaccttgaagagttttacagtagagaaggggatttaccagaccagtaacttcagggtccaaccgaccgaatccatcgtccgatttccaaatataactaatttatgtccgtttgacgaggtcttcaacgcaactcggttcgcgtcagtttatgcgtggaaccgcaaaagaataagcaactgcgtagctgactattccgttctctacaactctgcgccgttttttacttttaaatgctatggagtaagtccaacaaaattaaatgatctatgttttacaaatgtgtacgcagactcgtttgtaataaggggtgacgaagttcgtcagatagcaccagggcaaactgggaatattgcagactacaactataagctacccgatgacttcactggctgcgtcatcgcttggaatagtaataaattagatagtaaggtgagtgggaattataattacctatatcgtctctttagaaaaagtaacctcaagccattcgaacgcgacatttctacagaaatctatcaagctggcaataaaccttgcaacggtgtcgcgggcttcaactgctactttccccttaggtcgtactcttttcgacctacctatggtgtgggccaccagccctatagagttgttgtcctatcttttgaactattacatgccccagcgacggtatgcggacccaagaagtcgactaatttagtaaagaacaaatgcgttaattttaattttaatggccttaaagggacaggtgttttaacggaatcgaataaaaaattcttacctttccagcaatttggacgcgacatagctgatacgacggatgcagtcagagaccctcagacactggagatactggacataaccccgtgcagcttcgggggagtctccgtaataacccctgggacgaacacatccaatcaggtagcagtattatatcaaggcgtcaattgtacagaagttcctgtcgctatccatgcagatcaactcaccccgacctggcgcgtttatagcactgggagtaatgtattccaaactcgtgcaggatgtcttatcggggctgaatacgtgaataactcatacgagtgtgacattccaattggagctggcatatgtgccagctatcaaactcaaacgaagtcccaccaacaggcacagtctgtcgcgtctcaatcgatcattgcctatacaatgagtcttggtgccgaaaattcagttgcatatagcaacaactcaatagcgatacctactaatttcacaatcagtgtgaccaccgaaattctcccagtatcgatgacaaagacatccgtggattgtactatgtacatctgtggagactcgacggagtgctccaacttactccttcagtacgggtccttttgcactcaattaaagagggccctaacaggcattgctgttgagcaagacaagaacacgcaagaggtatttgcacaggtgaagcaaatatacaagacaccaccaattaagtactttggaggttttaacttctctcagatactcccagatcccagcaaaccctctaaacggagcttcatagaagacctcttgtttaataaagtgactttagctgatgcaggctttatcaagcaatatggggattgtttgggggatattgccgcccgcgacctcatctgcgcccagaaattcaagggtctaacagtattaccaccgctcctgacagacgagatgatcgctcaatacacttctgcgctgttggccgggacaattacgtctgggtggaccttcggcgcaggtgccgccttgcagatcccatttgcgatgcaaatggcgtatcgttttaacggtataggtgtcacacaaaacgtattatacgaaaaccagaaactaatagctaaccaatttaactcagcaataggaaaaatacaggattctctttcctctacggcgagcgccctcgggaaacttcaggatgtagtgaaccataacgctcaagcacttaataccctggttaagcaactatcaagcaagttcggtgctatctcatcagtgcttaatgacatcttcagtcgactagatcccccggaagcagaagttcaaatcgacagattgataactggccgcttgcaatctctacaaacatacgttacccagcagctgattcgggctgcggaaatccgagcatcggccaacctcgccgcgactaaaatgagcgagtgcgtattgggccagagtaaaagggttgacttctgcggtaagggctaccaccttatgagttttccgcagagtgcgcctcacggagttgtcttcctccacgtgacgtatgtgccggcacaggaaaaaaatttcaccaccgcccctgcgatatgtcatgatggtaaggcgcactttccaagagagggtgtctttgtttcaaatggaacccactggttcgttactcaacgtaatttttacgaacctcagattatcactacggataatacgttcgtgtcaggaaactgcgacgtggtaattggtatagtaaataatactgtgtatgatcccctccagccggagctggactcattcaaagaggaattagataagtacttcaaaaatcacacaagccctgatgtggacttgggagatatctcaggaattaacgcttccgttgtcaacatccaaaaagagatagacaggctgaatgaagtagcgaaaaacctgaacgaatccctgattgacttgcaagagctgggcaaatacgaacagtatattaaatggccctggtatatttggttggggttcatcgctggtttaatcgctattgttatggtcaccattatgctttgttgtatgacgtcctgttgttcttgtctaaagggctgctgttcgtgcggttcctgctgtaaattcgatgaggatgactccgaacccgttctgaaaggcgtcaagctccattatact

SEQ ID NO: 162 - DNA, 3810 bp, synthetic construct
  misc_feature 1..3810: note = encodes recombinant coronavirus Spike (S) polypeptide
  source 1..3810: mol_type = other DNA
atgtttgtttttctcgtactacttccactagtatctagccaatgtgtaaatttaaccacgaggacgcagctgcctccggcatatacgaatagtttcactaggggagtctattatccagataaagtgttccgaagcagtgttctacattcaacacaggacctcttccttcctttctttagcaacgtcacgtggttccatgtcataagcggcacaaacggcacaaagcgcttcgataatccggtgcttccgtttaacgatggggtttattttgcttctattgaaaagagcaacattatacgcggttggatcttcggaactacattggatagtaaaacgcaatcattgctaatcgttaataacgcgactaatgtagtgattaaggtgtgcgagttccagttttgcaatgacccctttttggatcataaaaataataaatcgtggatggaatcagaatttcgtgtatattcaagcgcaaacaactgtacgttcgagtacgtgagtcagcccttcttgatggatctggaagggaagcagggcaattttaaaaacttacgtgagtttgtatttaagaatatcgacgggtatttcaagatttactcaaagcacacaccgattattgttcgagagccggaagatttaccccaaggcttctcagcactggaacccttggtagacctacctatcggtattaatataacccgcttccaaaccttgttagcgctgcatcggagttatttaacccccggagactcatcgagcgggtggaccgccggggctgcagcttattacgtggggtatttacaaccacggacgttcttactcaagtacaacgagaacgggacgattactgatgccgtcgactgtgctttggacccgctgagcgaaaccaagtgcacactcaagtctttcacggtagagaaggggatctaccagacatcaaattttcgggtacaaccaacggagtccatcgtacgctttccgaatatcacgaatctttgtccattcgatgaggtattcaatgctacgcgttttgcgagtgtgtacgcgtggaataggaagcgtatctcaaattgcgtcgctgattactccgtactctataacagcgcgcccttctttaccttcaaatgctacggggtttctcctactaaactaaacgatctatgttttacgaacgtctacgcagacagctttgttatacgaggggacgaggttcggcagatcgcccccggccaaacaggaaacatcgccgactataattacaaactcccagatgactttactggttgcgtaattgcgtggaactctaacaagttagactccaaggtctcgggaaactacaattacctgtaccgtctcttcagaaaatctaacttaaagcctttcgagcgagatattagcactgaaatctatcaggcgggtaataaaccctgtaacggggtcgccggttttaactgctactttcctcttcggtcgtattcctttcgcccgacctatggagttggacaccaaccttatagagtcgttgttctaagttttgaattgctccatgccccggcgacggtatgcgggccaaagaaaagtactaatctcgttaagaataaatgtgtgaatttcaactttaacggacttaaaggtacgggcgtattgaccgagtcaaataaaaagtttttacccttccagcaatttggtagggatatcgcggatactactgacgcagtgagagatccacaaacacttgaaatcctagacatcaccccttgtagttttgggggagtgtctgtaatcacccctggtacaaacacttctaaccaagtcgcggttctttatcagggtgttaattgtacagaagtgcctgtcgccattcatgcagaccagctgacgcccacttggcgcgtctactcgacgggatctaatgtctttcagactcgagctggatgcctcatcggggcagaatacgtgaacaactcctatgaatgcgatattcctatcggtgctggcatttgcgcatcttatcaaacacagaccaaaagtcatcagcaagcgcaatccgttgccagtcaatctataattgcgtatacaatgtccttgggcgcggaaaattcagtcgcgtatagcaacaattctatcgctattccaacgaattttactatatcggtcacaacagagatactaccagtgtcgatgactaagacttcggtagattgcacaatgtacatatgcggagacagcacagaatgctcgaacctacttcttcaatatggttctttttgcactcagctcaagagagctcttactggcatagcagtggagcaagataaaaatacccaggaagtgtttgctcaagtaaaacagatatataaaacccctccgatcaaatattttggaggttttaacttctcacaaatactaccggacccttccaaaccatcgaaacggtccttcatagaggacttgctctttaataaggtaactttggcggatgctggttttataaagcagtatggagattgtcttggtgacatagcggccagagacctcatctgtgcacagaaattcaaaggtctaacagtacttccgcccctgctaacggacgagatgatagctcaatacaccagtgcccttctggctggaacgataaccagtggatggaccttcggcgcaggtgccgcactgcagattccgttcgcaatgcagatggcctatcggtttaatgggatcggcgtcactcaaaatgtattgtacgaaaatcagaaactcattgccaaccaattcaattcagcgataggcaagatccaggacagtctctcttccaccgcctccgccttaggtaagctacaagatgttgttaatcataacgctcaagcattgaatacgctggtaaaacaattgagcagcaaattcggcgcaattagctcagttttgaacgacatattctcccgacttgacccccccgaagctgaagtccaaatagataggctgataaccgggaggctacagtcactccaaacctacgtgactcaacagctcataagagcagccgaaataagagcctctgctaatctcgccgcgactaagatgtcagagtgtgttttaggtcaaagtaaaagggttgatttctgtggtaagggataccaccttatgtcctttccacaatcggctccacacggtgtggtctttctgcacgttacttatgtcccggctcaggagaagaatttcaccacagccccggctatttgtcatgacggcaaggcgcacttccccagagaaggcgtattcgtcagtaacggcactcactggttcgttactcaacgtaacttctacgaacctcagattataacgacagacaacacatttgtatcagggaactgtgatgtggtgatcggtatagtgaacaacacagtgtacgacccattacagccggagttagattctttcaaggaagagctggataagtacttcaagaatcacacctcgccagatgttgaccttggtgatatttcaggtataaacgcctctgtcgtgaatatccagaaagagatcgaccgtctcaacgaagtagcgaaaaatctaaacgaatcgttaattgaccttcaggagctggggaagtatgagcagtacattaagtggccctggtacatttggctgggctttattgcaggactgatagcaatagtgatggtcaccattatgttgtgctgcatgacatcctgctgctcttgtttaaaagggtgttgtagttgtggatcgtgttgcaagttcgacgaggatgattccgaacctgttctgaaaggcgtaaaattacactacaca

SEQ ID NO: 163 - DNA, 9308 bp, synthetic construct
  misc_feature 1..9308: note = encodes recombinant coronavirus Spike (S) polypeptide
  source 1..9308: mol_type = other DNA
ggaacggctccgcccactattaatgaaattaaaaattccaattttaaaaaacgcagcaagagaaacatttgtatgaaagaatgcgtagaaggaaagaaaaatgtcgtcgacatgctgaacaacaagattaatatgcctccgtgtataaaaaaaatattgaacgatttgaaagaaaacaatgtaccgcgcggcggtatgtacaggaagaggtttatactaaactgttacattgcaaacgtggtttcgtgtgccaagtgtgaaaaccgatgtttaatcaaggctctgacgcatttctacaaccacgactccaagtgtgtgggtgaagtcatgcatcttttaatcaaatcccaagatgtgtataaaccaccaaactgccaaaaaatgaaaactgtcgacaagctctgtccgtttgctggcaactgcaagggtctcaatcctatttgtaattattgaataataaaacaattataaatgctaaatttgttttttattaacgatacaaaccaaacgcaacaagaacatttgtagtattatctataattgaaaacgcgtagttataatcgctgaggtaatatttaaaatcattttcaaatgattcacagttaatttgcgacaatataattttattttcacataaactagacgccttgtcgtcttcttcttcgtattccttctctttttcatttttctcttcataaaaattaacatagttattatcgtatccatatatgtatctatcgtatagagtaaattttttgttgtcataaatatatatgtcttttttaatggggtgtatagtaccgctgcgcatagtttttctgtaatttacaacagtgctattttctggtagttcttcggagtgtgttgctttaattattaaatttatataatcaatgaatttgggatcgtcggttttgtacaatatgttgccggcatagtacgcagcttcttctagttcaattacaccattttttagcagcaccggattaacataactttccaaaatgttgtacgaaccgttaaacaaaaacagttcacctcccttttctatactattgtctgcgagcagttgtttgttgttaaaaataacagccattgtaatgagacgcacaaactaatatcacaaactggaaatgtctatcaatatatagttgctgatcagatctgatcatggagataattaaaatgataaccatctcgcaaataaataagtattttactgttttcgtaacagttttgtaataaaaaaacctataaatataggatccgccaccatgtttgtattcttagtattgctgcccctagtgagcagccagtgtgttaatctgacgacgcggacccaacttcctccagcctacacaaactcttttacgcgcggggtctattacccggacaaagtgttccgttcgagtgttttgcatagcacccaggatttattcctaccattcttttcaaatgttacctggttccatgtgattcacgtctccggtactaatggaactaaacggttcgacaaccccgttttgccgttcaacgatggggtgtacttcgcttctattgagaagtcgaatatcatacgtgggtggattttcggcacgaccttggatagtaaaactcagtcgttacttatagtaaataatgctaccaatgttgtgattaaggtgtgtgagttccagttttgtaatgatccctttcttgacgtctattatcataaaaataacaaatcatggatggaatcggagtttcgggtgtattcctctgcgaacaactgtacatttgaatatgtgtctcagccgttcctgatggatttggagggtaagcaaggcaactttaagaatttgcgagagttcgtcttcaagaacatagatggatactttaaaatttatagcaagcacacaccgattaatatagtgcgagaccttcctcaaggtttctcggcccttgagccgctagtggacctgcccattggaattaatatcacccggtttcagactctgcttgcccttcatcgttcttatctgacccctggcgattcttcatcaggatggacggctggggctgccgcctattatgtcggataccttcaaccaaggacttttctcctcaagtataacgagaacggaacaattacagatgcagtcgattgcgccctagaccctctgtcggaaacgaagtgcaccttgaagagttttacagtagagaaggggatttaccagaccagtaacttcagggtccaaccgaccgaatccatcgtccgatttccaaatataactaatttatgtccgtttgacgaggtcttcaacgcaactcggttcgcgtcagtttatgcgtggaaccgcaaaagaataagcaactgcgtagctgactattccgttctctacaactctgcgccgttttttacttttaaatgctatggagtaagtccaacaaaattaaatgatctatgttttacaaatgtgtacgcagactcgtttgtaataaggggtgacgaagttcgtcagatagcaccagggcaaactgggaatattgcagactacaactataagctacccgatgacttcactggctgcgtcatcgcttggaatagtaataaattagatagtaaggtgagtgggaattataattacctatatcgtctctttagaaaaagtaacctcaagccattcgaacgcgacatttctacagaaatctatcaagctggcaataaaccttgcaacggtgtcgcgggcttcaactgctactttccccttaggtcgtactcttttcgacctacctatggtgtgggccaccagccctatagagttgttgtcctatcttttgaactattacatgccccagcgacggtatgcggacccaagaagtcgactaatttagtaaagaacaaatgcgttaattttaattttaatggccttaaagggacaggtgttttaacggaatcgaataaaaaattcttacctttccagcaatttggacgcgacatagctgatacgacggatgcagtcagagaccctcagacactggagatactggacataaccccgtgcagcttcgggggagtctccgtaataacccctgggacgaacacatccaatcaggtagcagtattatatcaaggcgtcaattgtacagaagttcctgtcgctatccatgcagatcaactcaccccgacctggcgcgtttatagcactgggagtaatgtattccaaactcgtgcaggatgtcttatcggggctgaatacgtgaataactcatacgagtgtgacattccaattggagctggcatatgtgccagctatcaaactcaaacgaagtcccaccaacaggcacagtctgtcgcgtctcaatcgatcattgcctatacaatgagtcttggtgccgaaaattcagttgcatatagcaacaactcaatagcgatacctactaatttcacaatcagtgtgaccaccgaaattctcccagtatcgatgacaaagacatccgtggattgtactatgtacatctgtggagactcgacggagtgctccaacttactccttcagtacgggtccttttgcactcaattaaagagggccctaacaggcattgctgttgagcaagacaagaacacgcaagaggtatttgcacaggtgaagcaaatatacaagacaccaccaattaagtactttggaggttttaacttctctcagatactcccagatcccagcaaaccctctaaacggagcttcatagaagacctcttgtttaataaagtgactttagctgatgcaggctttatcaagcaatatggggattgtttgggggatattgccgcccgcgacctcatctgcgcccagaaattcaagggtctaacagtattaccaccgctcctgacagacgagatgatcgctcaatacacttctgcgctgttggccgggacaattacgtctgggtggaccttcggcgcaggtgccgccttgcagatcccatttgcgatgcaaatggcgtatcgttttaacggtataggtgtcacacaaaacgtattatacgaaaaccagaaactaatagctaaccaatttaactcagcaataggaaaaatacaggattctctttcctctacggcgagcgccctcgggaaacttcaggatgtagtgaaccataacgctcaagcacttaataccctggttaagcaactatcaagcaagttcggtgctatctcatcagtgcttaatgacatcttcagtcgactagatcccccggaagcagaagttcaaatcgacagattgataactggccgcttgcaatctctacaaacatacgttacccagcagctgattcgggctgcggaaatccgagcatcggccaacctcgccgcgactaaaatgagcgagtgcgtattgggccagagtaaaagggttgacttctgcggtaagggctaccaccttatgagttttccgcagagtgcgcctcacggagttgtcttcctccacgtgacgtatgtgccggcacaggaaaaaaatttcaccaccgcccctgcgatatgtcatgatggtaaggcgcactttccaagagagggtgtctttgtttcaaatggaacccactggttcgttactcaacgtaatttttacgaacctcagattatcactacggataatacgttcgtgtcaggaaactgcgacgtggtaattggtatagtaaataatactgtgtatgatcccctccagccggagctggactcattcaaagaggaattagataagtacttcaaaaatcacacaagccctgatgtggacttgggagatatctcaggaattaacgcttccgttgtcaacatccaaaaagagatagacaggctgaatgaagtagcgaaaaacctgaacgaatccctgattgacttgcaagagctgggcaaatacgaacagtatattaaatggccctggtatatttggttggggttcatcgctggtttaatcgctattgttatggtcaccattatgctttgttgtatgacgtcctgttgttcttgtctaaagggctgctgttcgtgcggttcctgctgtaaattcgatgaggatgactccgaacccgttctgaaaggcgtcaagctccattatacttaatgaaagcttgtcgagaagtactagaggatcataatcagccataccacatttgtagaggttttacttgctttaaaaaacctcccacacctccccctgaacctgaaacataaaatgaatgcaattgttgttgttaacttgtttattgcagcttataatggttacaaataaagcaatagcatcacaaatttcacaaataaagcatttttttcactgcattctagttgtggtttgtccaaactcatcaatgtatcttatcatgtctggatctgatcactgcttgagcctaggtagctgagcgcatgcaagctgatccgggttattagtacatttattaagcgctagattctgtgcgttgttgatttacagacaattgttgtacgtattttaataattcattaaatttataatctttagggtggtatgttagagcgaaaatcaaatgattttcagcgtctttatatctgaatttaaatattaaatcctcaatagatttgtaaaataggtttcgattagtttcaaacaagggttgtttttccgaaccgatggctggactatctaatggattttcgctcaacgccacaaaacttgccaaatcttgtagcagcaatctagctttgtcgatattcgtttgtgttttgttttgtaataaaggttcgacgtcgttcaaaatattatgcgcttttgtatttctttcatcactgtcgttagtgtacaattgactcgacgtaaacacgttaaatagagcttggacatatttaacatcgggcgtgttagctttattaggccgattatcgtcgtcgtcccaaccctcgtcgttagaagttgcttccgaagacgattttgccatagccacacgacgcctattaattgtgtcggctaacacgtccgcgatcaaatttgtagttgagctttttggaattatttctgattgcgggcgtttttgggcgggtttcaatctaactgtgcccgattttaattcagacaacacgttagaaagcgatggtgcaggcggtggtaacatttcagacggcaaatctactaatggcggcggtggtggagctgatgataaatctaccatcggtggaggcgcaggcggggctggcggcggaggcggaggcggaggtggtggcggtgatgcagacggcggtttaggctcaaatgtctctttaggcaacacagtcggcacctcaactattgtactggtttcgggcgccgtttttggtttgaccggtctgagacgagtgcgatttttttcgtttctaatagcttccaacaattgttgtctgtcgtctaaaggtgcagcgggttgaggttccgtcggcattggtggagcgggcggcaattcagacatcgatggtggtggtggtggtggaggcgctggaatgttaggcacgggagaaggtggtggcggcggtgccgccggtataatttgttctggtttagtttgttcgcgcacgattgtgggcaccggcgcaggcgccgctggctgcacaacggaaggtcgtctgcttcgaggcagcgcttggggtggtggcaattcaatattataattggaatacaaatcgtaaaaatctgctataagcattgtaatttcgctatcgtttaccgtgccgatatttaacaaccgctcaatgtaagcaattgtattgtaaagagattgtctcaagctcggatcgatcccgcacgccgataacaagccttttcatttttactacagcattgtagtggcgagacacttcgctgtcgtcgaggtttaaacgcttcctcgctcactgactcgctgcgctcggtcgttcggctgcggcgagcggtatcagctcactcaaaggcggtaatacggttatccacagaatcaggggataacgcaggaaagaacatgtgagcaaaaggccagcaaaaggccaggaaccgtaaaaaggccgcgttgctggcgtttttccataggctccgcccccctgacgagcatcacaaaaatcgacgctcaagtcagaggtggcgaaacccgacaggactataaagataccaggcgtttccccctggaagctccctcgtgcgctctcctgttccgaccctgccgcttaccggatacctgtccgcctttctcccttcgggaagcgtggcgctttctcatagctcacgctgtaggtatctcagttcggtgtaggtcgttcgctccaagctgggctgtgtgcacgaaccccccgttcagcccgaccgctgcgccttatccggtaactatcgtcttgagtccaacccggtaagacacgacttatcgccactggcagcagccactggtaacaggattagcagagcgaggtatgtaggcggtgctacagagttcttgaagtggtggcctaactacggctacactagaaggacagtatttggtatctgcgctctgctgaagccagttaccttcggaaaaagagttggtagctcttgatccggcaaacaaaccaccgctggtagcggtggtttttttgtttgcaagcagcagattacgcgcagaaaaaaaggatctcaagaagatcctttgatcttttctacggggtctgacgctcagtggaacgaaaactcacgttaagggattttggtcatgagattatcaaaaaggatcttcacctagatccttttaaattaaaaatgaagttttaaatcaatctaaagtatatatgagtaaacttggtctgacagttaccaatgcttaatcagtgaggcacctatctcagcgatctgtctatttcgttcatccatagttgcctgactccccgtcgtgtagataactacgatacgggagggcttaccatctggccccagtgctgcaatgataccgcgagacccacgctcaccggctccagatttatcagcaataaaccagccagccggaagggccgagcgcagaagtggtcctgcaactttatccgcctccatccagtctattaattgttgccgggaagctagagtaagtagttcgccagttaatagtttgcgcaacgttgttgccattgctacaggcatcgtggtgtcacgctcgtcgtttggtatggcttcattcagctccggttcccaacgatcaaggcgagttacatgatcccccatgttgtgcaaaaaagcggttagctccttcggtcctccgatcgttgtcagaagtaagttggccgcagtgttatcactcatggttatggcagcactgcataattctcttactgtcatgccatccgtaagatgcttttctgtgactggtgagtactcaaccaagtcattctgagaatagtgtatgcggcgaccgagttgctcttgcccggcgtcaatacgggataataccgcgccacatagcagaactttaaaagtgctcatcattggaaaacgttcttcggggcgaaaactctcaaggatcttaccgctgttgagatccagttcgatgtaacccactcgtgcacccaactgatcttcagcatcttttactttcaccagcgtttctgggtgagcaaaaacaggaaggcaaaatgccgcaaaaaagggaataagggcgacacggaaatgttgaatactcatactcttcctttttcaatattattgaagcatttatcagggttattgtctcatgagcggatacatatttgaatgtatttagaaaaataaacaaataggggttccgcgcacatttccccgaaaagtgccacctgacgcgccctgtagcggcgcattaagcgcggcgggtgtggtggttacgcgcagcgtgaccgctacacttgccagcgccctagcgcccgctcctttcgctttcttcccttcctttctcgccacgttcgccggctttccccgtcaagctctaaatcgggggctccctttagggttccgatttagtgctttacggcacctcgaccccaaaaaacttgattagggtgatggttcacgtagtgggccatcgccctgatagacggtttttcgccctttgacgttggagtccacgttctttaatagtggactcttgttccaaactggaacaacactcaaccctatctcggtctattcttttgatttataagggattttgccgatttcggcctattggttaaaaaatgagctgatttaacaaaaatttaacgcgaattttaacaaaatattaacgtttacaatttcccattcgccattcaggctgcgcaactgttgggaagggcgatcggtgcgggcctcttcgctattacgcca

SEQ ID NO: 164 - DNA, 9299 bp, synthetic construct
  misc_feature 1..9299: note = encodes recombinant coronavirus Spike (S) polypeptide
  source 1..9299: mol_type = other DNA
ggaacggctccgcccactattaatgaaattaaaaattccaattttaaaaaacgcagcaagagaaacatttgtatgaaagaatgcgtagaaggaaagaaaaatgtcgtcgacatgctgaacaacaagattaatatgcctccgtgtataaaaaaaatattgaacgatttgaaagaaaacaatgtaccgcgcggcggtatgtacaggaagaggtttatactaaactgttacattgcaaacgtggtttcgtgtgccaagtgtgaaaaccgatgtttaatcaaggctctgacgcatttctacaaccacgactccaagtgtgtgggtgaagtcatgcatcttttaatcaaatcccaagatgtgtataaaccaccaaactgccaaaaaatgaaaactgtcgacaagctctgtccgtttgctggcaactgcaagggtctcaatcctatttgtaattattgaataataaaacaattataaatgctaaatttgttttttattaacgatacaaaccaaacgcaacaagaacatttgtagtattatctataattgaaaacgcgtagttataatcgctgaggtaatatttaaaatcattttcaaatgattcacagttaatttgcgacaatataattttattttcacataaactagacgccttgtcgtcttcttcttcgtattccttctctttttcatttttctcttcataaaaattaacatagttattatcgtatccatatatgtatctatcgtatagagtaaattttttgttgtcataaatatatatgtcttttttaatggggtgtatagtaccgctgcgcatagtttttctgtaatttacaacagtgctattttctggtagttcttcggagtgtgttgctttaattattaaatttatataatcaatgaatttgggatcgtcggttttgtacaatatgttgccggcatagtacgcagcttcttctagttcaattacaccattttttagcagcaccggattaacataactttccaaaatgttgtacgaaccgttaaacaaaaacagttcacctcccttttctatactattgtctgcgagcagttgtttgttgttaaaaataacagccattgtaatgagacgcacaaactaatatcacaaactggaaatgtctatcaatatatagttgctgatcagatctgatcatggagataattaaaatgataaccatctcgcaaataaataagtattttactgttttcgtaacagttttgtaataaaaaaacctataaatataggatccgccaccatgtttgtttttctcgtactacttccactagtatctagccaatgtgtaaatttaaccacgaggacgcagctgcctccggcatatacgaatagtttcactaggggagtctattatccagataaagtgttccgaagcagtgttctacattcaacacaggacctcttccttcctttctttagcaacgtcacgtggttccatgtcataagcggcacaaacggcacaaagcgcttcgataatccggtgcttccgtttaacgatggggtttattttgcttctattgaaaagagcaacattatacgcggttggatcttcggaactacattggatagtaaaacgcaatcattgctaatcgttaataacgcgactaatgtagtgattaaggtgtgcgagttccagttttgcaatgacccctttttggatcataaaaataataaatcgtggatggaatcagaatttcgtgtatattcaagcgcaaacaactgtacgttcgagtacgtgagtcagcccttcttgatggatctggaagggaagcagggcaattttaaaaacttacgtgagtttgtatttaagaatatcgacgggtatttcaagatttactcaaagcacacaccgattattgttcgagagccggaagatttaccccaaggcttctcagcactggaacccttggtagacctacctatcggtattaatataacccgcttccaaaccttgttagcgctgcatcggagttatttaacccccggagactcatcgagcgggtggaccgccggggctgcagcttattacgtggggtatttacaaccacggacgttcttactcaagtacaacgagaacgggacgattactgatgccgtcgactgtgctttggacccgctgagcgaaaccaagtgcacactcaagtctttcacggtagagaaggggatctaccagacatcaaattttcgggtacaaccaacggagtccatcgtacgctttccgaatatcacgaatctttgtccattcgatgaggtattcaatgctacgcgttttgcgagtgtgtacgcgtggaataggaagcgtatctcaaattgcgtcgctgattactccgtactctataacagcgcgcccttctttaccttcaaatgctacggggtttctcctactaaactaaacgatctatgttttacgaacgtctacgcagacagctttgttatacgaggggacgaggttcggcagatcgcccccggccaaacaggaaacatcgccgactataattacaaactcccagatgactttactggttgcgtaattgcgtggaactctaacaagttagactccaaggtctcgggaaactacaattacctgtaccgtctcttcagaaaatctaacttaaagcctttcgagcgagatattagcactgaaatctatcaggcgggtaataaaccctgtaacggggtcgccggttttaactgctactttcctcttcggtcgtattcctttcgcccgacctatggagttggacaccaaccttatagagtcgttgttctaagttttgaattgctccatgccccggcgacggtatgcgggccaaagaaaagtactaatctcgttaagaataaatgtgtgaatttcaactttaacggacttaaaggtacgggcgtattgaccgagtcaaataaaaagtttttacccttccagcaatttggtagggatatcgcggatactactgacgcagtgagagatccacaaacacttgaaatcctagacatcaccccttgtagttttgggggagtgtctgtaatcacccctggtacaaacacttctaaccaagtcgcggttctttatcagggtgttaattgtacagaagtgcctgtcgccattcatgcagaccagctgacgcccacttggcgcgtctactcgacgggatctaatgtctttcagactcgagctggatgcctcatcggggcagaatacgtgaacaactcctatgaatgcgatattcctatcggtgctggcatttgcgcatcttatcaaacacagaccaaaagtcatcagcaagcgcaatccgttgccagtcaatctataattgcgtatacaatgtccttgggcgcggaaaattcagtcgcgtatagcaacaattctatcgctattccaacgaattttactatatcggtcacaacagagatactaccagtgtcgatgactaagacttcggtagattgcacaatgtacatatgcggagacagcacagaatgctcgaacctacttcttcaatatggttctttttgcactcagctcaagagagctcttactggcatagcagtggagcaagataaaaatacccaggaagtgtttgctcaagtaaaacagatatataaaacccctccgatcaaatattttggaggttttaacttctcacaaatactaccggacccttccaaaccatcgaaacggtccttcatagaggacttgctctttaataaggtaactttggcggatgctggttttataaagcagtatggagattgtcttggtgacatagcggccagagacctcatctgtgcacagaaattcaaaggtctaacagtacttccgcccctgctaacggacgagatgatagctcaatacaccagtgcccttctggctggaacgataaccagtggatggaccttcggcgcaggtgccgcactgcagattccgttcgcaatgcagatggcctatcggtttaatgggatcggcgtcactcaaaatgtattgtacgaaaatcagaaactcattgccaaccaattcaattcagcgataggcaagatccaggacagtctctcttccaccgcctccgccttaggtaagctacaagatgttgttaatcataacgctcaagcattgaatacgctggtaaaacaattgagcagcaaattcggcgcaattagctcagttttgaacgacatattctcccgacttgacccccccgaagctgaagtccaaatagataggctgataaccgggaggctacagtcactccaaacctacgtgactcaacagctcataagagcagccgaaataagagcctctgctaatctcgccgcgactaagatgtcagagtgtgttttaggtcaaagtaaaagggttgatttctgtggtaagggataccaccttatgtcctttccacaatcggctccacacggtgtggtctttctgcacgttacttatgtcccggctcaggagaagaatttcaccacagccccggctatttgtcatgacggcaaggcgcacttccccagagaaggcgtattcgtcagtaacggcactcactggttcgttactcaacgtaacttctacgaacctcagattataacgacagacaacacatttgtatcagggaactgtgatgtggtgatcggtatagtgaacaacacagtgtacgacccattacagccggagttagattctttcaaggaagagctggataagtacttcaagaatcacacctcgccagatgttgaccttggtgatatttcaggtataaacgcctctgtcgtgaatatccagaaagagatcgaccgtctcaacgaagtagcgaaaaatctaaacgaatcgttaattgaccttcaggagctggggaagtatgagcagtacattaagtggccctggtacatttggctgggctttattgcaggactgatagcaatagtgatggtcaccattatgttgtgctgcatgacatcctgctgctcttgtttaaaagggtgttgtagttgtggatcgtgttgcaagttcgacgaggatgattccgaacctgttctgaaaggcgtaaaattacactacacataatgaaagcttgtcgagaagtactagaggatcataatcagccataccacatttgtagaggttttacttgctttaaaaaacctcccacacctccccctgaacctgaaacataaaatgaatgcaattgttgttgttaacttgtttattgcagcttataatggttacaaataaagcaatagcatcacaaatttcacaaataaagcatttttttcactgcattctagttgtggtttgtccaaactcatcaatgtatcttatcatgtctggatctgatcactgcttgagcctaggtagctgagcgcatgcaagctgatccgggttattagtacatttattaagcgctagattctgtgcgttgttgatttacagacaattgttgtacgtattttaataattcattaaatttataatctttagggtggtatgttagagcgaaaatcaaatgattttcagcgtctttatatctgaatttaaatattaaatcctcaatagatttgtaaaataggtttcgattagtttcaaacaagggttgtttttccgaaccgatggctggactatctaatggattttcgctcaacgccacaaaacttgccaaatcttgtagcagcaatctagctttgtcgatattcgtttgtgttttgttttgtaataaaggttcgacgtcgttcaaaatattatgcgcttttgtatttctttcatcactgtcgttagtgtacaattgactcgacgtaaacacgttaaatagagcttggacatatttaacatcgggcgtgttagctttattaggccgattatcgtcgtcgtcccaaccctcgtcgttagaagttgcttccgaagacgattttgccatagccacacgacgcctattaattgtgtcggctaacacgtccgcgatcaaatttgtagttgagctttttggaattatttctgattgcgggcgtttttgggcgggtttcaatctaactgtgcccgattttaattcagacaacacgttagaaagcgatggtgcaggcggtggtaacatttcagacggcaaatctactaatggcggcggtggtggagctgatgataaatctaccatcggtggaggcgcaggcggggctggcggcggaggcggaggcggaggtggtggcggtgatgcagacggcggtttaggctcaaatgtctctttaggcaacacagtcggcacctcaactattgtactggtttcgggcgccgtttttggtttgaccggtctgagacgagtgcgatttttttcgtttctaatagcttccaacaattgttgtctgtcgtctaaaggtgcagcgggttgaggttccgtcggcattggtggagcgggcggcaattcagacatcgatggtggtggtggtggtggaggcgctggaatgttaggcacgggagaaggtggtggcggcggtgccgccggtataatttgttctggtttagtttgttcgcgcacgattgtgggcaccggcgcaggcgccgctggctgcacaacggaaggtcgtctgcttcgaggcagcgcttggggtggtggcaattcaatattataattggaatacaaatcgtaaaaatctgctataagcattgtaatttcgctatcgtttaccgtgccgatatttaacaaccgctcaatgtaagcaattgtattgtaaagagattgtctcaagctcggatcgatcccgcacgccgataacaagccttttcatttttactacagcattgtagtggcgagacacttcgctgtcgtcgaggtttaaacgcttcctcgctcactgactcgctgcgctcggtcgttcggctgcggcgagcggtatcagctcactcaaaggcggtaatacggttatccacagaatcaggggataacgcaggaaagaacatgtgagcaaaaggccagcaaaaggccaggaaccgtaaaaaggccgcgttgctggcgtttttccataggctccgcccccctgacgagcatcacaaaaatcgacgctcaagtcagaggtggcgaaacccgacaggactataaagataccaggcgtttccccctggaagctccctcgtgcgctctcctgttccgaccctgccgcttaccggatacctgtccgcctttctcccttcgggaagcgtggcgctttctcatagctcacgctgtaggtatctcagttcggtgtaggtcgttcgctccaagctgggctgtgtgcacgaaccccccgttcagcccgaccgctgcgccttatccggtaactatcgtcttgagtccaacccggtaagacacgacttatcgccactggcagcagccactggtaacaggattagcagagcgaggtatgtaggcggtgctacagagttcttgaagtggtggcctaactacggctacactagaaggacagtatttggtatctgcgctctgctgaagccagttaccttcggaaaaagagttggtagctcttgatccggcaaacaaaccaccgctggtagcggtggtttttttgtttgcaagcagcagattacgcgcagaaaaaaaggatctcaagaagatcctttgatcttttctacggggtctgacgctcagtggaacgaaaactcacgttaagggattttggtcatgagattatcaaaaaggatcttcacctagatccttttaaattaaaaatgaagttttaaatcaatctaaagtatatatgagtaaacttggtctgacagttaccaatgcttaatcagtgaggcacctatctcagcgatctgtctatttcgttcatccatagttgcctgactccccgtcgtgtagataactacgatacgggagggcttaccatctggccccagtgctgcaatgataccgcgagacccacgctcaccggctccagatttatcagcaataaaccagccagccggaagggccgagcgcagaagtggtcctgcaactttatccgcctccatccagtctattaattgttgccgggaagctagagtaagtagttcgccagttaatagtttgcgcaacgttgttgccattgctacaggcatcgtggtgtcacgctcgtcgtttggtatggcttcattcagctccggttcccaacgatcaaggcgagttacatgatcccccatgttgtgcaaaaaagcggttagctccttcggtcctccgatcgttgtcagaagtaagttggccgcagtgttatcactcatggttatggcagcactgcataattctcttactgtcatgccatccgtaagatgcttttctgtgactggtgagtactcaaccaagtcattctgagaatagtgtatgcggcgaccgagttgctcttgcccggcgtcaatacgggataataccgcgccacatagcagaactttaaaagtgctcatcattggaaaacgttcttcggggcgaaaactctcaaggatcttaccgctgttgagatccagttcgatgtaacccactcgtgcacccaactgatcttcagcatcttttactttcaccagcgtttctgggtgagcaaaaacaggaaggcaaaatgccgcaaaaaagggaataagggcgacacggaaatgttgaatactcatactcttcctttttcaatattattgaagcatttatcagggttattgtctcatgagcggatacatatttgaatgtatttagaaaaataaacaaataggggttccgcgcacatttccccgaaaagtgccacctgacgcgccctgtagcggcgcattaagcgcggcgggtgtggtggttacgcgcagcgtgaccgctacacttgccagcgccctagcgcccgctcctttcgctttcttcccttcctttctcgccacgttcgccggctttccccgtcaagctctaaatcgggggctccctttagggttccgatttagtgctttacggcacctcgaccccaaaaaacttgattagggtgatggttcacgtagtgggccatcgccctgatagacggtttttcgccctttgacgttggagtccacgttctttaatagtggactcttgttccaaactggaacaacactcaaccctatctcggtctattcttttgatttataagggattttgccgatttcggcctattggttaaaaaatgagctgatttaacaaaaatttaacgcgaattttaacaaaatattaacgtttacaatttcccattcgccattcaggctgcgcaactgttgggaagggcgatcggtgcgggcctcttcgctattacgcca

SEQ ID NO: 165 - DNA, 3843 bp, synthetic construct
  misc_feature 1..3843: note = encodes recombinant coronavirus Spike (S) polypeptide
  source 1..3843: mol_type = other DNA
ggatccgccaccatgtttgtattcttagtattgctgcccctagtgagcagccagtgtgttaatctgacgacgcggacccaacttcctccagcctacacaaactcttttacgcgcggggtctattacccggacaaagtgttccgttcgagtgttttgcatagcacccaggatttattcctaccattcttttcaaatgttacctggttccatgtgattcacgtctccggtactaatggaactaaacggttcgacaaccccgttttgccgttcaacgatggggtgtacttcgcttctattgagaagtcgaatatcatacgtgggtggattttcggcacgaccttggatagtaaaactcagtcgttacttatagtaaataatgctaccaatgttgtgattaaggtgtgtgagttccagttttgtaatgatccctttcttgacgtctattatcataaaaataacaaatcatggatggaatcggagtttcgggtgtattcctctgcgaacaactgtacatttgaatatgtgtctcagccgttcctgatggatttggagggtaagcaaggcaactttaagaatttgcgagagttcgtcttcaagaacatagatggatactttaaaatttatagcaagcacacaccgattaatatagtgcgagaccttcctcaaggtttctcggcccttgagccgctagtggacctgcccattggaattaatatcacccggtttcagactctgcttgcccttcatcgttcttatctgacccctggcgattcttcatcaggatggacggctggggctgccgcctattatgtcggataccttcaaccaaggacttttctcctcaagtataacgagaacggaacaattacagatgcagtcgattgcgccctagaccctctgtcggaaacgaagtgcaccttgaagagttttacagtagagaaggggatttaccagaccagtaacttcagggtccaaccgaccgaatccatcgtccgatttccaaatataactaatttatgtccgtttgacgaggtcttcaacgcaactcggttcgcgtcagtttatgcgtggaaccgcaaaagaataagcaactgcgtagctgactattccgttctctacaactctgcgccgttttttacttttaaatgctatggagtaagtccaacaaaattaaatgatctatgttttacaaatgtgtacgcagactcgtttgtaataaggggtgacgaagttcgtcagatagcaccagggcaaactgggaatattgcagactacaactataagctacccgatgacttcactggctgcgtcatcgcttggaatagtaataaattagatagtaaggtgagtgggaattataattacctatatcgtctctttagaaaaagtaacctcaagccattcgaacgcgacatttctacagaaatctatcaagctggcaataaaccttgcaacggtgtcgcgggcttcaactgctactttccccttaggtcgtactcttttcgacctacctatggtgtgggccaccagccctatagagttgttgtcctatcttttgaactattacatgccccagcgacggtatgcggacccaagaagtcgactaatttagtaaagaacaaatgcgttaattttaattttaatggccttaaagggacaggtgttttaacggaatcgaataaaaaattcttacctttccagcaatttggacgcgacatagctgatacgacggatgcagtcagagaccctcagacactggagatactggacataaccccgtgcagcttcgggggagtctccgtaataacccctgggacgaacacatccaatcaggtagcagtattatatcaaggcgtcaattgtacagaagttcctgtcgctatccatgcagatcaactcaccccgacctggcgcgtttatagcactgggagtaatgtattccaaactcgtgcaggatgtcttatcggggctgaatacgtgaataactcatacgagtgtgacattccaattggagctggcatatgtgccagctatcaaactcaaacgaagtcccaccaacaggcacagtctgtcgcgtctcaatcgatcattgcctatacaatgagtcttggtgccgaaaattcagttgcatatagcaacaactcaatagcgatacctactaatttcacaatcagtgtgaccaccgaaattctcccagtatcgatgacaaagacatccgtggattgtactatgtacatctgtggagactcgacggagtgctccaacttactccttcagtacgggtccttttgcactcaattaaagagggccctaacaggcattgctgttgagcaagacaagaacacgcaagaggtatttgcacaggtgaagcaaatatacaagacaccaccaattaagtactttggaggttttaacttctctcagatactcccagatcccagcaaaccctctaaacggagcttcatagaagacctcttgtttaataaagtgactttagctgatgcaggctttatcaagcaatatggggattgtttgggggatattgccgcccgcgacctcatctgcgcccagaaattcaagggtctaacagtattaccaccgctcctgacagacgagatgatcgctcaatacacttctgcgctgttggccgggacaattacgtctgggtggaccttcggcgcaggtgccgccttgcagatcccatttgcgatgcaaatggcgtatcgttttaacggtataggtgtcacacaaaacgtattatacgaaaaccagaaactaatagctaaccaatttaactcagcaataggaaaaatacaggattctctttcctctacggcgagcgccctcgggaaacttcaggatgtagtgaaccataacgctcaagcacttaataccctggttaagcaactatcaagcaagttcggtgctatctcatcagtgcttaatgacatcttcagtcgactagatcccccggaagcagaagttcaaatcgacagattgataactggccgcttgcaatctctacaaacatacgttacccagcagctgattcgggctgcggaaatccgagcatcggccaacctcgccgcgactaaaatgagcgagtgcgtattgggccagagtaaaagggttgacttctgcggtaagggctaccaccttatgagttttccgcagagtgcgcctcacggagttgtcttcctccacgtgacgtatgtgccggcacaggaaaaaaatttcaccaccgcccctgcgatatgtcatgatggtaaggcgcactttccaagagagggtgtctttgtttcaaatggaacccactggttcgttactcaacgtaatttttacgaacctcagattatcactacggataatacgttcgtgtcaggaaactgcgacgtggtaattggtatagtaaataatactgtgtatgatcccctccagccggagctggactcattcaaagaggaattagataagtacttcaaaaatcacacaagccctgatgtggacttgggagatatctcaggaattaacgcttccgttgtcaacatccaaaaagagatagacaggctgaatgaagtagcgaaaaacctgaacgaatccctgattgacttgcaagagctgggcaaatacgaacagtatattaaatggccctggtatatttggttggggttcatcgctggtttaatcgctattgttatggtcaccattatgctttgttgtatgacgtcctgttgttcttgtctaaagggctgctgttcgtgcggttcctgctgtaaattcgatgaggatgactccgaacccgttctgaaaggcgtcaagctccattatacttaatgaaagctt

SEQ ID NO: 166 - DNA, 3834 bp, synthetic construct
  misc_feature 1..3834: note = encodes recombinant coronavirus Spike (S) polypeptide
  source 1..3834: mol_type = other DNA
ggatccgccaccatgtttgtttttctcgtactacttccactagtatctagccaatgtgtaaatttaaccacgaggacgcagctgcctccggcatatacgaatagtttcactaggggagtctattatccagataaagtgttccgaagcagtgttctacattcaacacaggacctcttccttcctttctttagcaacgtcacgtggttccatgtcataagcggcacaaacggcacaaagcgcttcgataatccggtgcttccgtttaacgatggggtttattttgcttctattgaaaagagcaacattatacgcggttggatcttcggaactacattggatagtaaaacgcaatcattgctaatcgttaataacgcgactaatgtagtgattaaggtgtgcgagttccagttttgcaatgacccctttttggatcataaaaataataaatcgtggatggaatcagaatttcgtgtatattcaagcgcaaacaactgtacgttcgagtacgtgagtcagcccttcttgatggatctggaagggaagcagggcaattttaaaaacttacgtgagtttgtatttaagaatatcgacgggtatttcaagatttactcaaagcacacaccgattattgttcgagagccggaagatttaccccaaggcttctcagcactggaacccttggtagacctacctatcggtattaatataacccgcttccaaaccttgttagcgctgcatcggagttatttaacccccggagactcatcgagcgggtggaccgccggggctgcagcttattacgtggggtatttacaaccacggacgttcttactcaagtacaacgagaacgggacgattactgatgccgtcgactgtgctttggacccgctgagcgaaaccaagtgcacactcaagtctttcacggtagagaaggggatctaccagacatcaaattttcgggtacaaccaacggagtccatcgtacgctttccgaatatcacgaatctttgtccattcgatgaggtattcaatgctacgcgttttgcgagtgtgtacgcgtggaataggaagcgtatctcaaattgcgtcgctgattactccgtactctataacagcgcgcccttctttaccttcaaatgctacggggtttctcctactaaactaaacgatctatgttttacgaacgtctacgcagacagctttgttatacgaggggacgaggttcggcagatcgcccccggccaaacaggaaacatcgccgactataattacaaactcccagatgactttactggttgcgtaattgcgtggaactctaacaagttagactccaaggtctcgggaaactacaattacctgtaccgtctcttcagaaaatctaacttaaagcctttcgagcgagatattagcactgaaatctatcaggcgggtaataaaccctgtaacggggtcgccggttttaactgctactttcctcttcggtcgtattcctttcgcccgacctatggagttggacaccaaccttatagagtcgttgttctaagttttgaattgctccatgccccggcgacggtatgcgggccaaagaaaagtactaatctcgttaagaataaatgtgtgaatttcaactttaacggacttaaaggtacgggcgtattgaccgagtcaaataaaaagtttttacccttccagcaatttggtagggatatcgcggatactactgacgcagtgagagatccacaaacacttgaaatcctagacatcaccccttgtagttttgggggagtgtctgtaatcacccctggtacaaacacttctaaccaagtcgcggttctttatcagggtgttaattgtacagaagtgcctgtcgccattcatgcagaccagctgacgcccacttggcgcgtctactcgacgggatctaatgtctttcagactcgagctggatgcctcatcggggcagaatacgtgaacaactcctatgaatgcgatattcctatcggtgctggcatttgcgcatcttatcaaacacagaccaaaagtcatcagcaagcgcaatccgttgccagtcaatctataattgcgtatacaatgtccttgggcgcggaaaattcagtcgcgtatagcaacaattctatcgctattccaacgaattttactatatcggtcacaacagagatactaccagtgtcgatgactaagacttcggtagattgcacaatgtacatatgcggagacagcacagaatgctcgaacctacttcttcaatatggttctttttgcactcagctcaagagagctcttactggcatagcagtggagcaagataaaaatacccaggaagtgtttgctcaagtaaaacagatatataaaacccctccgatcaaatattttggaggttttaacttctcacaaatactaccggacccttccaaaccatcgaaacggtccttcatagaggacttgctctttaataaggtaactttggcggatgctggttttataaagcagtatggagattgtcttggtgacatagcggccagagacctcatctgtgcacagaaattcaaaggtctaacagtacttccgcccctgctaacggacgagatgatagctcaatacaccagtgcccttctggctggaacgataaccagtggatggaccttcggcgcaggtgccgcactgcagattccgttcgcaatgcagatggcctatcggtttaatgggatcggcgtcactcaaaatgtattgtacgaaaatcagaaactcattgccaaccaattcaattcagcgataggcaagatccaggacagtctctcttccaccgcctccgccttaggtaagctacaagatgttgttaatcataacgctcaagcattgaatacgctggtaaaacaattgagcagcaaattcggcgcaattagctcagttttgaacgacatattctcccgacttgacccccccgaagctgaagtccaaatagataggctgataaccgggaggctacagtcactccaaacctacgtgactcaacagctcataagagcagccgaaataagagcctctgctaatctcgccgcgactaagatgtcagagtgtgttttaggtcaaagtaaaagggttgatttctgtggtaagggataccaccttatgtcctttccacaatcggctccacacggtgtggtctttctgcacgttacttatgtcccggctcaggagaagaatttcaccacagccccggctatttgtcatgacggcaaggcgcacttccccagagaaggcgtattcgtcagtaacggcactcactggttcgttactcaacgtaacttctacgaacctcagattataacgacagacaacacatttgtatcagggaactgtgatgtggtgatcggtatagtgaacaacacagtgtacgacccattacagccggagttagattctttcaaggaagagctggataagtacttcaagaatcacacctcgccagatgttgaccttggtgatatttcaggtataaacgcctctgtcgtgaatatccagaaagagatcgaccgtctcaacgaagtagcgaaaaatctaaacgaatcgttaattgaccttcaggagctggggaagtatgagcagtacattaagtggccctggtacatttggctgggctttattgcaggactgatagcaatagtgatggtcaccattatgttgtgctgcatgacatcctgctgctcttgtttaaaagggtgttgtagttgtggatcgtgttgcaagttcgacgaggatgattccgaacctgttctgaaaggcgtaaaattacactacacataatgaaagctt

SEQ ID NO: 167 - protein, 1273 aa, synthetic construct
  REGION 1..1273: note = recombinant coronavirus Spike (S) polypeptide
MFVFLVLLPLVSSQCVNLTTRTQLPPAYTNSFTRGVYYPDKVFRSSVLHSTQDLFLPFFSNVTWFHVIHVSGTNGTKRFDNPVLPFNDGVYFASIEKSNIIRGWIFGTTLDSKTQSLLIVNNATNVVIKVCEFQFCNDPFLDVYYHKNNKSWMESEFRVYSSANNCTFEYVSQPFLMDLEGKQGNFKNLREFVFKNIDGYFKIYSKHTPINIVRDLPQGFSALEPLVDLPIGINITRFQTLLALHRSYLTPGDSSSGWTAGAAAYYVGYLQPRTFLLKYNENGTITDAVDCALDPLSETKCTLKSFTVEKGIYQTSNFRVQPTESIVRFPNITNLCPFDEVFNATRFASVYAWNRKRISNCVADYSVLYNSAPFFTFKCYGVSPTKLNDLCFTNVYADSFVIRGDEVRQIAPGQTGNIADYNYKLPDDFTGCVIAWNSNKLDSKVSGNYNYLYRLFRKSNLKPFERDISTEIYQAGNKPCNGVAGFNCYFPLRSYSFRPTYGVGHQPYRVVVLSFELLHAPATVCGPKKSTNLVKNKCVNFNFNGLKGTGVLTESNKKFLPFQQFGRDIADTTDAVRDPQTLEILDITPCSFGGVSVITPGTNTSNQVAVLYQGVNCTEVPVAIHADQLTPTWRVYSTGSNVFQTRAGCLIGAEYVNNSYECDIPIGAGICASYQTQTKSHQQAQSVASQSIIAYTMSLGAENSVAYSNNSIAIPTNFTISVTTEILPVSMTKTSVDCTMYICGDSTECSNLLLQYGSFCTQLKRALTGIAVEQDKNTQEVFAQVKQIYKTPPIKYFGGFNFSQILPDPSKPSKRSFIEDLLFNKVTLADAGFIKQYGDCLGDIAARDLICAQKFKGLTVLPPLLTDEMIAQYTSALLAGTITSGWTFGAGAALQIPFAMQMAYRFNGIGVTQNVLYENQKLIANQFNSAIGKIQDSLSSTASALGKLQDVVNHNAQALNTLVKQLSSKFGAISSVLNDIFSRLDPPEAEVQIDRLITGRLQSLQTYVTQQLIRAAEIRASANLAATKMSECVLGQSKRVDFCGKGYHLMSFPQSAPHGVVFLHVTYVPAQEKNFTTAPAICHDGKAHFPREGVFVSNGTHWFVTQRNFYEPQIITTDNTFVSGNCDVVIGIVNNTVYDPLQPELDSFKEELDKYFKNHTSPDVDLGDISGINASVVNIQKEIDRLNEVAKNLNESLIDLQELGKYEQYIKWPWYIWLGFIAGLIAIVMVTIMLCCMTSCCSCLKGCCSCGSCCKFDEDDSEPVLKGVKLHYT

SEQ ID NO: 168 - DNA, 3843 bp, synthetic construct
  misc_feature 1..3843: note = encodes recombinant coronavirus Spike (S) polypeptide
  source 1..3843: mol_type = other DNA
ggatccgccaccatgtttgtattcttagtattgctgcccctagtgagcagccagtgtgttaatctgacgacgcggacccaacttcctccagcctacacaaactcttttacgcgcggggtctattacccggacaaagtgttccgttcgagtgttttgcatagcacccaggatttattcctaccattcttttcaaatgttacctggttccatgtgattcacgtctccggtactaatggaactaaacggttcgacaaccccgttttgccgttcaacgatggggtgtacttcgcttctattgagaagtcgaatatcatacgtgggtggattttcggcacgaccttggatagtaaaactcagtcgttacttatagtaaataatgctaccaatgttgtgattaaggtgtgtgagttccagttttgtaatgatccctttcttgacgtctattatcataaaaataacaaatcatggatggaatcggagtttcgggtgtattcctctgcgaacaactgtacatttgaatatgtgtctcagccgttcctgatggatttggagggtaagcaaggcaactttaagaatttgcgagagttcgtcttcaagaacatagatggatactttaaaatttatagcaagcacacaccgattaatatagtgcgagaccttcctcaaggtttctcggcccttgagccgctagtggacctgcccattggaattaatatcacccggtttcagactctgcttgcccttcatcgttcttatctgacccctggcgattcttcatcaggatggacggctggggctgccgcctattatgtcggataccttcaaccaaggacttttctcctcaagtataacgagaacggaacaattacagatgcagtcgattgcgccctagaccctctgtcggaaacgaagtgcaccttgaagagttttacagtagagaaggggatttaccagaccagtaacttcagggtccaaccgaccgaatccatcgtccgatttccaaatataactaatttatgtccgtttgacgaggtcttcaacgcaactcggttcgcgtcagtttatgcgtggaaccgcaaaagaataagcaactgcgtagctgactattccgttctctacaactctgcgccgttttttacttttaaatgctatggagtaagtccaacaaaattaaatgatctatgttttacaaatgtgtacgcagactcgtttgtaataaggggtgacgaagttcgtcagatagcaccagggcaaactgggaatattgcagactacaactataagctacccgatgacttcactggctgcgtcatcgcttggaatagtaataaattagatagtaaggtgagtgggaattataattacctatatcgtctctttagaaaaagtaacctcaagccattcgaacgcgacatttctacagaaatctatcaagctggcaataaaccttgcaacggtgtcgcgggcttcaactgctactttccccttaggtcgtactcttttcgacctacctatggtgtgggccaccagccctatagagttgttgtcctatcttttgaactattacatgccccagcgacggtatgcggacccaagaagtcgactaatttagtaaagaacaaatgcgttaattttaattttaatggccttaaagggacaggtgttttaacggaatcgaataaaaaattcttacctttccagcaatttggacgcgacatagctgatacgacggatgcagtcagagaccctcagacactggagatactggacataaccccgtgcagcttcgggggagtctccgtaataacccctgggacgaacacatccaatcaggtagcagtattatatcaaggcgtcaattgtacagaagttcctgtcgctatccatgcagatcaactcaccccgacctggcgcgtttatagcactgggagtaatgtattccaaactcgtgcaggatgtcttatcggggctgaatacgtgaataactcatacgagtgtgacattccaattggagctggcatatgtgccagctatcaaactcaaacgaagtcccaccaacaggcacagtctgtcgcgtctcaatcgatcattgcctatacaatgagtcttggtgccgaaaattcagttgcatatagcaacaactcaatagcgatacctactaatttcacaatcagtgtgaccaccgaaattctcccagtatcgatgacaaagacatccgtggattgtactatgtacatctgtggagactcgacggagtgctccaacttactccttcagtacgggtccttttgcactcaattaaagagggccctaacaggcattgctgttgagcaagacaagaacacgcaagaggtatttgcacaggtgaagcaaatatacaagacaccaccaattaagtactttggaggttttaacttctctcagatactcccagatcccagcaaaccctctaaacggagcttcatagaagacctcttgtttaataaagtgactttagctgatgcaggctttatcaagcaatatggggattgtttgggggatattgccgcccgcgacctcatctgcgcccagaaattcaagggtctaacagtattaccaccgctcctgacagacgagatgatcgctcaatacacttctgcgctgttggccgggacaattacgtctgggtggaccttcggcgcaggtgccgccttgcagatcccatttgcgatgcaaatggcgtatcgttttaacggtataggtgtcacacaaaacgtattatacgaaaaccagaaactaatagctaaccaatttaactcagcaataggaaaaatacaggattctctttcctctacggcgagcgccctcgggaaacttcaggatgtagtgaaccataacgctcaagcacttaataccctggttaagcaactatcaagcaagttcggtgctatctcatcagtgcttaatgacatcttcagtcgactagatcccccggaagcagaagttcaaatcgacagattgataactggccgcttgcaatctctacaaacatacgttacccagcagctgattcgggctgcggaaatccgagcatcggccaacctcgccgcgactaaaatgagcgagtgcgtattgggccagagtaaaagggttgacttctgcggtaagggctaccaccttatgagttttccgcagagtgcgcctcacggagttgtcttcctccacgtgacgtatgtgccggcacaggaaaaaaatttcaccaccgcccctgcgatatgtcatgatggtaaggcgcactttccaagagagggtgtctttgtttcaaatggaacccactggttcgttactcaacgtaatttttacgaacctcagattatcactacggataatacgttcgtgtcaggaaactgcgacgtggtaattggtatagtaaataatactgtgtatgatcccctccagccggagctggactcattcaaagaggaattagataagtacttcaaaaatcacacaagccctgatgtggacttgggagatatctcaggaattaacgcttccgttgtcaacatccaaaaagagatagacaggctgaatgaagtagcgaaaaacctgaacgaatccctgattgacttgcaagagctgggcaaatacgaacagtatattaaatggccctggtatatttggttggggttcatcgctggtttaatcgctattgttatggtcaccattatgctttgttgtatgacgtcctgttgttcttgtctaaagggctgctgttcgtgcggttcctgctgtaaattcgatgaggatgactccgaacccgttctgaaaggcgtcaagctccattatacttaatgaaagtcc

SEQ ID NO: 169 - DNA, 3819 bp, synthetic construct; identical to SEQ ID NO: 161
  misc_feature 1..3819: note = encodes recombinant coronavirus Spike (S) polypeptide
  source 1..3819: mol_type = other DNA

SEQ ID NO: 170 - protein, 1270 aa, synthetic construct
  REGION 1..1270: note = recombinant coronavirus Spike (S) polypeptide
MFVFLVLLPLVSSQCVNLTTRTQLPPAYTNSFTRGVYYPDKVFRSSVLHSTQDLFLPFFSNVTWFHVISGTNGTKRFDNPVLPFNDGVYFASIEKSNIIRGWIFGTTLDSKTQSLLIVNNATNVVIKVCEFQFCNDPFLDHKNNKSWMESEFRVYSSANNCTFEYVSQPFLMDLEGKQGNFKNLREFVFKNIDGYFKIYSKHTPIIVREPEDLPQGFSALEPLVDLPIGINITRFQTLLALHRSYLTPGDSSSGWTAGAAAYYVGYLQPRTFLLKYNENGTITDAVDCALDPLSETKCTLKSFTVEKGIYQTSNFRVQPTESIVRFPNITNLCPFDEVFNATRFASVYAWNRKRISNCVADYSVLYNSAPFFTFKCYGVSPTKLNDLCFTNVYADSFVIRGDEVRQIAPGQTGNIADYNYKLPDDFTGCVIAWNSNKLDSKVSGNYNYLYRLFRKSNLKPFERDISTEIYQAGNKPCNGVAGFNCYFPLRSYSFRPTYGVGHQPYRVVVLSFELLHAPATVCGPKKSTNLVKNKCVNFNFNGLKGTGVLTESNKKFLPFQQFGRDIADTTDAVRDPQTLEILDITPCSFGGVSVITPGTNTSNQVAVLYQGVNCTEVPVAIHADQLTPTWRVYSTGSNVFQTRAGCLIGAEYVNNSYECDIPIGAGICASYQTQTKSHQQAQSVASQSIIAYTMSLGAENSVAYSNNSIAIPTNFTISVTTEILPVSMTKTSVDCTMYICGDSTECSNLLLQYGSFCTQLKRALTGIAVEQDKNTQEVFAQVKQIYKTPPIKYFGGFNFSQILPDPSKPSKRSFIEDLLFNKVTLADAGFIKQYGDCLGDIAARDLICAQKFKGLTVLPPLLTDEMIAQYTSALLAGTITSGWTFGAGAALQIPFAMQMAYRFNGIGVTQNVLYENQKLIANQFNSAIGKIQDSLSSTASALGKLQDVVNHNAQALNTLVKQLSSKFGAISSVLNDIFSRLDPPEAEVQIDRLITGRLQSLQTYVTQQLIRAAEIRASANLAATKMSECVLGQSKRVDFCGKGYHLMSFPQSAPHGVVFLHVTYVPAQEKNFTTAPAICHDGKAHFPREGVFVSNGTHWFVTQRNFYEPQIITTDNTFVSGNCDVVIGIVNNTVYDPLQPELDSFKEELDKYFKNHTSPDVDLGDISGINASVVNIQKEIDRLNEVAKNLNESLIDLQELGKYEQYIKWPWYIWLGFIAGLIAIVMVTIMLCCMTSCCSCLKGCCSCGSCCKFDEDDSEPVLKGVKLHYT

SEQ ID NO: 171 - DNA, 3834 bp, synthetic construct
  misc_feature 1..3834: note = encodes recombinant coronavirus Spike (S) polypeptide
  source 1..3834: mol_type = other DNA
ggatccgccaccatgtttgtttttctcgtactacttccactagtatctagccaatgtgtaaatttaaccacgaggacgcagctgcctccggcatatacgaatagtttcactaggggagtctattatccagataaagtgttccgaagcagtgttctacattcaacacaggacctcttccttcctttctttagcaacgtcacgtggttccatgtcataagcggcacaaacggcacaaagcgcttcgataatccggtgcttccgtttaacgatggggtttattttgcttctattgaaaagagcaacattatacgcggttggatcttcggaactacattggatagtaaaacgcaatcattgctaatcgttaataacgcgactaatgtagtgattaaggtgtgcgagttccagttttgcaatgacccctttttggatcataaaaataataaatcgtggatggaatcagaatttcgtgtatattcaagcgcaaacaactgtacgttcgagtacgtgagtcagcccttcttgatggatctggaagggaagcagggcaattttaaaaacttacgtgagtttgtatttaagaatatcgacgggtatttcaagatttactcaaagcacacaccgattattgttcgagagccggaagatttaccccaaggcttctcagcactggaacccttggtagacctacctatcggtattaatataacccgcttccaaaccttgttagcgctgcatcggagttatttaacccccggagactcatcgagcgggtggaccgccggggctgcagcttattacgtggggtatttacaaccacggacgttcttactcaagtacaacgagaacgggacgattactgatgccgtcgactgtgctttggacccgctgagcgaaaccaagtgcacactcaagtctttcacggtagagaaggggatctaccagacatcaaattttcgggtacaaccaacggagtccatcgtacgctttccgaatatcacgaatctttgtccattcgatgaggtattcaatgctacgcgttttgcgagtgtgtacgcgtggaataggaagcgtatctcaaattgcgtcgctgattactccgtactctataacagcgcgcccttctttaccttcaaatgctacggggtttctcctactaaactaaacgatctatgttttacgaacgtctacgcagacagctttgttatacgaggggacgaggttcggcagatcgcccccggccaaacaggaaacatcgccgactataattacaaactcccagatgactttactggttgcgtaattgcgtggaactctaacaagttagactccaaggtctcgggaaactacaattacctgtaccgtctcttcagaaaatctaacttaaagcctttcgagcgagatattagcactgaaatctatcaggcgggtaataaaccctgtaacggggtcgccggttttaactgctactttcctcttcggtcgtattcctttcgcccgacctatggagttggacaccaaccttatagagtcgttgttctaagttttgaattgctccatgccccggcgacggtatgcgggccaaagaaaagtactaatctcgttaagaataaatgtgtgaatttcaactttaacggacttaaaggtacgggcgtattgaccgagtcaaataaaaagtttttacccttccagcaatttggtagggatatcgcggatactactgacgcagtgagagatccacaaacacttgaaatcctagacatcaccccttgtagttttgggggagtgtctgtaatcacccctggtacaaacacttctaaccaagtcgcggttctttatcagggtgttaattgtacagaagtgcctgtcgccattcatgcagaccagctgacgcccacttggcgcgtctactcgacgggatctaatgtctttcagactcgagctggatgcctcatcggggcagaatacgtgaacaactcctatgaatgcgatattcctatcggtgctggcatttgcgcatcttatcaaacacagaccaaaagtcatcagcaagcgcaatccgttgccagtcaatctataattgcgtatacaatgtccttgggcgcggaaaattcagtcgcgtatagcaacaattctatcgctattccaacgaattttactatatcggtcacaacagagatactaccagtgtcgatgactaagacttcggtagattgcacaatgtacatatgcggagacagcacagaatgctcgaacctacttcttcaatatggttctttttgcactcagctcaagagagctcttactggcatagcagtggagcaagataaaaatacccaggaagtgtttgctcaagtaaaacagatatataaaacccctccgatcaaatattttggaggttttaacttctcacaaatactaccggacccttccaaaccatcgaaacggtccttcatagaggacttgctctttaataaggtaactttggcggatgctggttttataaagcagtatggagattgtcttggtgacatagcggccagagacctcatctgtgcacagaaattcaaaggtctaacagtacttccgcccctgctaacggacgagatgatagctcaatacaccagtgcccttctggctggaacgataaccagtggatggaccttcggcgcaggtgccgcactgcagattccgttcgcaatgcagatggcctatcggtttaatgggatcggcgtcactcaaaatgtattgtacgaaaatcagaaactcattgccaaccaattcaattcagcgataggcaagatccaggacagtctctcttccaccgcctccgccttaggtaagctacaagatgttgttaatcataacgctcaagcattgaatacgctggtaaaacaattgagcagcaaattcggcgcaattagctcagttttgaacgacatattctcccgacttgacccccccgaagctgaagtccaaatagataggctgataaccgggaggctacagtcactccaaacctacgtgactcaacagctcataagagcagccgaaataagagcctctgctaatctcgccgcgactaagatgtcagagtgtgttttaggtcaaagtaaaagggttgatttctgtggtaagggataccaccttatgtcctttccacaatcggctccacacggtgtggtctttctgcacgttacttatgtcccggctcaggagaagaatttcaccacagccccggctatttgtcatgacggcaaggcgcacttccccagagaaggcgtattcgtcagtaacggcactcactggttcgttactcaacgtaacttctacgaacctcagattataacgacagacaacacatttgtatcagggaactgtgatgtggtgatcggtatagtgaacaacacagtgtacgacccattacagccggagttagattctttcaaggaagagctggataagtacttcaagaatcacacctcgccagatgttgaccttggtgatatttcaggtataaacgcctctgtcgtgaatatccagaaagagatcgaccgtctcaacgaagtagcgaaaaatctaaacgaatcgttaattgaccttcaggagctggggaagtatgagcagtacattaagtggccctggtacatttggctgggctttattgcaggactgatagcaatagtgatggtcaccattatgttgtgctgcatgacatcctgctgctcttgtttaaaagggtgttgtagttgtggatcgtgttgcaagttcgacgaggatgattccgaacctgttctgaaaggcgtaaaattacactacacataatgaaagtcc

SEQ ID NO: 172 - DNA, 3810 bp, synthetic construct; identical to SEQ ID NO: 162
  misc_feature 1..3810: note = encodes recombinant coronavirus Spike (S) polypeptide
  source 1..3810: mol_type = other DNA

SEQ ID NO: 173 - protein, 1271 aa, synthetic construct
  REGION 1..1271: note = recombinant coronavirus Spike (S) polypeptide
MFVFLVLLPLVSSQCVNLRTRTQLPPAYTNSFTRGVYYPDKVFRSSVLHSTQDLFLPFFSNVTWFHAIHVSGTNGTKRFDNPVLPFNDGVYFASTEKSNIIRGWIFGTTLDSKTQSLLIVNNATNVVIKVCEFQFCNDPFLDVYYHKNNKSWMESGVYSSANNCTFEYVSQPFLMDLEGKQGNFKNLREFVFKNIDGYFKIYSKHTPINLVRDLPQGFSALEPLVDLPIGINITRFQTLLALHRSYLTPGDSSSGWTAGAAAYYVGYLQPRTFLLKYNENGTITDAVDCALDPLSETKCTLKSFTVEKGIYQTSNFRVQPTESIVRFPNITNLCPFGEVFNATRFASVYAWNRKRISNCVADYSVLYNSASFSTFKCYGVSPTKLNDLCFTNVYADSFVIRGDEVRQIAPGQTGKIADYNYKLPDDFTGCVIAWNSNNLDSKVGGNYNYRYRLFRKSNLKPFERDISTEIYQAGSKPCNGVEGFNCYFPLQSYGFQPTNGVGYQPYRVVVLSFELLHAPATVCGPKKSTNLVKNKCVNFNFNGLTGTGVLTESNKKFLPFQQFGRDIADTTDAVRDPQTLEILDITPCSFGGVSVITPGTNTSNQVAVLYQGVNCTEVPVAIHADQLTPTWRVYSTGSNVFQTRAGCLIGAEHVNNSYECDIPIGAGICASYQTQTNSRQQAQSVASQSIIAYTMSLGAENSVAYSNNSIAIPTNFTISVTTEILPVSMTKTSVDCTMYICGDSTECSNLLLQYGSFCTQLNRALTGIAVEQDKNTQEVFAQVKQIYKTPPIKDFGGFNFSQILPDPSKPSKRSFIEDLLFNKVTLADAGFIKQYGDCLGDIAARDLICAQKFNGLTVLPPLLTDEMIAQYTSALLAGTITSGWTFGAGAALQIPFAMQMAYRFNGIGVTQNVLYENQKLIANQFNSAIGKIQDSLSSTASALGKLQNVVNQNAQALNTLVKQLSSNFGAISSVLNDILSRLDPPEAEVQIDRLITGRLQSLQTYVTQQLIRAAEIRASANLAATKMSECVLGQSKRVDFCGKGYHLMSFPQSAPHGVVFLHVTYVPAQEKNFTTAPAICHDGKAHFPREGVFVSNGTHWFVTQRNFYEPQIITTDNTFVSGNCDVVIGIVNNTVYDPLQPELDSFKEELDKYFKNHTSPDVDLGDISGINASVVNIQKEIDRLNEVAKNLNESLIDLQELGKYEQYIKWPWYIWLGFIAGLIAIVMVTIMLCCMTSCCSCLKGCCSCGSCCKFDEDDSEPVLKGVKLHYT

SEQ ID NO: 174 - protein, 1258 aa, synthetic construct
  REGION 1..1258: note = recombinant coronavirus Spike (S) polypeptide
QCVNLTTRTQLPPAYTNSFTRGVYYPDKVFRSSVLHSTQDLFLPFFSNVTWFHVIHVSGTNGTKRFDNPVLPFNDGVYFASIEKSNIIRGWIFGTTLDSKTQSLLIVNNATNVVIKVCEFQFCNDPFLDVYYHKNNKSWMESEFRVYSSANNCTFEYVSQPFLMDLEGKQGNFKNLREFVFKNIDGYFKIYSKHTPINIVRDLPQGFSALEPLVDLPIGINITRFQTLLALHRSYLPGDSSSGWTAGAAAYYVGYLQPRTFLLKYNENGTITDAVDCALDPLSETKCTLKSFTVEKGIYQTSNFRVQPTESIVRFPNITNLCPFDEVFNATRFASVYAWNRKRISNCVADYSVLYNLAPFFTFKCYGVSPTKLNDLCFTNVYADSFVIRGDEVRQIAPGQTGNIADYNYKLPDDFTGCVIAWNSNKLDSKVSGNYNYLYRLFRKSNLKPFERDISTEIYQAGNKPCNGVAGFNCYFPLRSYSFRPTYGVGHQPYRVVVLSFELLHAPATVCGPKKSTNLVKNKCVNFNFNGLKGTGVLTESNKKFLPFQQFGRDIADTTDAVRDPQTLEILDITPCSFGGVSVITPGTNTSNQVAVLYQGVNCTEVPVAIHADQLTPTWRVYSTGSNVFQTRAGCLIGAEYVNNSYECDIPIGAGICASYQTQTKSHQQAQSVASQSIIAYTMSLGAENSVAYSNNSIAIPTNFTISVTTEILPVSMTKTSVDCTMYICGDSTECSNLLLQYGSFCTQLKRALTGIAVEQDKNTQEVFAQVKQIYKTPPIKYFGGFNFSQILPDPSKPSKRSFIEDLLFNKVTLADAGFIKQYGDCLGDIAARDLICAQKFKGLTVLPPLLTDEMIAQYTSALLAGTITSGWTFGAGAALQIPFAMQMAYRFNGIGVTQNVLYENQKLIANQFNSAIGKIQDSLSSTASALGKLQDVVNHNAQALNTLVKQLSSKFGAISSVLNDIFSRLDPPEAEVQIDRLITGRLQSLQTYVTQQLIRAAEIRASANLAATKMSECVLGQSKRVDFCGKGYHLMSFPQSAPHGVVFLHVTYVPAQEKNFTTAPAICHDGKAHFPREGVFVSNGTHWFVTQRNFYEPQIITTDNTFVSGNCDVVIGIVNNTVYDPLQPELDSFKELDKYFKNHTSPDVDLGDISGINASVVNIQKEIDRLNEVAKNLNESLIDLQELGKYEQYIKWPWYIWLGFIAGLIAIVMVTIMLCCMTSCCSCLKGCCSCGSCCKFDEDDSEPVLKGVKLHYT

SEQ ID NO: 175 - protein, 1257 aa, synthetic construct
  REGION 1..1257: note = recombinant coronavirus Spike (S) polypeptide
QCVNLTTRTQLPPAYTNSFTRGVYYPDKVFRSSVLHSTQDLFLPFFSNVTWFHVISGTNGTKRFDNPVLPFNDGVYFASIEKSNIIRGWIFGTTLDSKTQSLLIVNNATNVVIKVCEFQFCNDPFLDHKNNKSWMESEFRVYSSANNCTFEYVSQPFLMDLEGKQGNFKNLREFVFKNIDGYFKIYSKHTPIIVREPEDLPQGFSALEPLVDLPIGINITRFQTLLALHRSYLTPGDSSSGWTAGAAAYYVGYLQPRTFLLKYNENGTITDAVDCALDPLSETKCTLKSFTVEKGIYQTSNFRVQPTESIVRFPNITNLCPFDEVFNATRFASVYAWNRKRISNCVADYSVLYNLAPFFTFKCYGVSPTKLNDLCFTNVYADSFVIRGDEVRQIAPGQTGNIADYNYKLPDDFTGCVIAWNSNKLDSKVSGNYNYLYRLFRKSNLKPFERDISTEIYQAGNKPCNGVAGFNCYFPLRSYSFRPTYGVGHQPYRVVVLSFELLHAPATVCGPKKSTNLVKNKCVNFNFNGLKGTGVLTESNKKFLPFQQFGRDIADTTDAVRDPQTLEILDITPCSFGGVSVITPGTNTSNQVAVLYQGVNCTEVPVAIHADQLTPTWRVYSTGSNVFQTRAGCLIGAEYVNNSYECDIPIGAGICASYQTQTKSHQQAQSVASQSIIAYTMSLGAENSVAYSNNSIAIPTNFTISVTTEILPVSMTKTSVDCTMYICGDSTECSNLLLQYGSFCTQLKRALTGIAVEQDKNTQEVFAQVKQIYKTPPIKYFGGFNFSQILPDPSKPSKRSFIEDLLFNKVTLADAGFIKQYGDCLGDIAARDLICAQKFKGLTVLPPLLTDEMIAQYTSALLAGTITSGWTFGAGAALQIPFAMQMAYRFNGIGVTQNVLYENQKLIANQFNSAIGKIQDSLSSTASALGKLQDVVNHNAQALNTLVKQLSSKFGAISSVLNDIFSRLDPPEAEVQIDRLITGRLQSLQTYVTQQLIRAAEIRASANLAATKMSECVLGQSKRVDFCGKGYHLMSFPQSAPHGVVFLHVTYVPAQEKNFTTAPAICHDGKAHFPREGVFVSNGTHWFVTQRNFYEPQIITTDNTFVSGNCDVVIGIVNNTVYDPLQPELDSFKEELDKYFKNHTSPDVDLGDISGINASVVNIQKEIDRLNEVAKNLNESLIDLQELGKYEQYIKWPWYIWLGFIAGLIAIVMVTIMLCCMTSCCSCLKGCCSCGSCCKFDEDDSEPVLKGVKLHYT

SEQ ID NO: 176 - protein, 1258 aa, synthetic construct
  REGION 1..1258: note = recombinant coronavirus Spike (S) polypeptide
QCVNLRTRTQLPPAYTNSFTRGVYYPDKVFRSSVLHSTQDLFLPFFSNVTWFHAIHVSGTNGTKRFDNPVLPFNDGVYFASTEKSNIIRGWIFGTTLDSKTQSLLIVNNATNVVIKVCEFQFCNDPFLDVYYHKNNKSWMESGVYSSANNCTFEYVSQPFLMDLEGKQGNFKNLREFVFKNIDGYFKIYSKHTPINLVRDLPQGFSALEPLVDLPIGINITRFQTLLALHRSYLTPGDSSSGWTAGAAAYYVGYLQPRTFLLKYNENGTITDAVDCALDPLSETKCTLKSFTVEKGIYQTSNFRVQPTESIVRFPNITNLCPFGEVFNATRFASVYAWNRKRISNCVADYSVLYNSASFSTFKCYGVSPTKLNDLCFTNVYADSFVIRGDEVRQIAPGQTGKIADYNYKLPDDFTGCVIAWNSNNLDSKVGGNYNYRYRLFRKSNLKPFERDISTEIYQAGSKPCNGVEGFNCYFPLQSYGFQPTNGVGYQPYRVVVLSFELLHAPATVCGPKKSTNLVKNKCVNFNFNGLTGTGVLTESNKKFLPFQQFGRDIADTTDAVRDPQTLEILDITPCSFGGVSVITPGTNTSNQVAVLYQGVNCTEVPVAIHADQLTPTWRVYSTGSNVFQTRAGCLIGAEHVNNSYECDIPIGAGICASYQTQTNSRQQAQSVASQSIIAYTMSLGAENSVAYSNNSIAIPTNFTISVTTEILPVSMTKTSVDCTMYICGDSTECSNLLLQYGSFCTQLNRALTGIAVEQDKNTQEVFAQVKQIYKTPPIKDFGGFNFSQILPDPSKPSKRSFIEDLLFNKVTLADAGFIKQYGDCLGDIAARDLICAQKFNGLTVLPPLLTDEMIAQYTSALLAGTITSGWTFGAGAALQIPFAMQMAYRFNGIGVTQNVLYENQKLIANQFNSAIGKIQDSLSSTASALGKLQNVVNQNAQALNTLVKQLSSNFGAISSVLNDILSRLDPPEAEVQIDRLITGRLQSLQTYVTQQLIRAAEIRASANLAATKMSECVLGQSKRVDFCGKGYHLMSFPQSAPHGVVFLHVTYVPAQEKNFTTAPAICHDGKAHFPREGVFVSNGTHWFVTQRNFYEPQIITTDNTFVSGNCDVVIGIVNNTVYDPLQPELDSFKEELDKYFKNHTSPDVDLGDISGINASVVNIQKEIDRLNEVAKNLNESLIDLQELGKYEQYIKWPWYIWLGFIAGLIAIVMVTIMLCCMTSCCSCLKGCCSCGSCCKFDEDDSEPVLKGVKLHYT

SEQ ID NO: 177 - protein, 1273 aa, synthetic construct
  REGION 1..1273: note = Recombinant SARS-CoV-2 S Polypeptide
MFVFLVLLPLVSSQCVNLTTRTQLPPAYTNSFTRGVYYPDKVFRSSVLHSTQDLFLPFFSNVTWFHAIHVSGTNGTKRFDNPVLPFNDGVYFASIEKSNIIRGWIFGTTLDSKTQSLLIVNNATNVVIKVCEFQFCNDPFLDVYYHKNNKSWMKSEFRVYSSANNCTFEYVSQPFLMDLEGKQGNFKNLREFVFKNIDGYFKIYSKHTPINLVRDLPQGFSALEPLVDLPIGINITRFQTLLALHRSYLTPGDSSSGWTAGAAAYYVGYLQPRTFLLKYNENGTITDAVDCALDPLSETKCTLKSFTVEKGIYQTSNFRVQPTESIVRFPNITNLCPFGEVFNATRFASVYAWNRKRISNCVADYSVLYNSASFSTFKCYGVSPTKLNDLCFTNVYADSFVIRGDEVRQIAPGQTGKIADYNYKLPDDFTGCVIAWNSNNLDSKVGGNYNYRYRLFRKSNLKPFERDISTEIYQAGSTPCNGVQGFNCYFPLQSYGFQPTNGVGYQPYRVVVLSFELLHAPATVCGPKKSTNLVKNKCVNFNFNGLTGTGVLTESNKKFLPFQQFGRDIADTTDAVRDPQTLEILDITPCSFGGVSVITPGTNTSNQVAVLYQGVNCTEVPVAIHADQLTPTWRVYSTGSNVFQTRAGCLIGAEHVNNSYECDIPIGAGICASYQTQTNSRQQAQSVASQSIIAYTMSLGAENSVAYSNNSIAIPTNFTISVTTEILPVSMTKTSVDCTMYICGDSTECSNLLLQYGSFCTQLNRALTGIAVEQDKNTQEVFAQVKQIYKTPPIKDFGGFNFSQILPDPSKPSKRSFIEDLLFNKVTLADAGFIKQYGDCLGDIAARDLICAQKFNGLTVLPPLLTDEMIAQYTSALLAGTITSGWTFGAGAALQIPFAMQMAYRFNGIGVTQNVLYENQKLIANQFNSAIGKIQDSLSSTASALGKLQDVVNQNAQALNTLVKQLSSNFGAISSVLNDILSRLDPPEAEVQIDRLITGRLQSLQTYVTQQLIRAAEIRASANLAATKMSECVLGQSKRVDFCGKGYHLMSFPQSAPHGVVFLHVTYVPAHEKNFTTAPAICHDGKAHFPREGVFVSNGTHWFVTQRNFYEPQIITTDNTFVSGNCDVVIGIVNNTVYDPLQPELDSFKEELDKYFKNHTSPDVDLGDISGINASVVNIQKEIDRLNEVAKNLNESLIDLQELGKYEQYIKWPWYIWLGFIAGLIAIVMVTIMLCCMTSCCSCLKGCCSCGSCCKFDEDDSEPVLKGVKLHYT

SEQ ID NO: 178 - protein, 1271 aa, synthetic construct
  REGION 1..1271: note = Recombinant SARS-CoV-2 S Polypeptide
MFVFLVLLPLVSSQCVNLRTRTQLPPAYTNSFTRGVYYPDKVFRSSVLHSTQDLFLPFFSNVTWFHAIHVSGTNGTKRFDNPVLPFNDGVYFASTEKSNIIRGWIFGTTLDSKTQSLLIVNNATNVVIKVCEFQFCNDPFLDVYYHKNNKSWMESGVYSSANNCTFEYVSQPFLMDLEGKQGNFKNLREFVFKNIDGYFKIYSKHTPINLVRDLPQGFSALEPLVDLPIGINITRFQTLLALHRSYLTPGDSSSGITAGAAAYYVGYLQPRTFLLKYNENGTITDAVDCALDPLSETKCTLKSFTVEKGIYQTSNFRVQPTESIVRFPNITNLCPFGEVFNATRFASVYAWNRKRISNCVADYSVLYNSASFSTFKCYGVSPTKLNDLCFTNVYADSFVIRGDEVRQIAPGQTGNIADYNYKLPDDFTGCVIAWNSNNLDSKVGGNYNYRYRLFRKSNLKPFERDISTEIYQAGSKPCNGVEGFNCYFPLQSYGFQPTNGVGYQPYRVVVLSFELLHAPATVCGPKKSTNLVKNKCVNFNFNGLTGTGVLTESNKKFLPFQQFGRDIADTTDAVRDPQTLEILDITPCSFGGVSVITPGTNTSNQVAVLYQGVNCTEVPVAIHADQLTPTWRVYSTGSNVFQTRAGCLIGAEHVNNSYECDIPIGAGICASYQTQTNSRQQAQSVASQSIIAYTMSLGAENSVAYSNNSIAIPTNFTISVTTEILPVSMTKTSVDCTMYICGDSTECSNLLLQYGSFCTQLNRALTGIAVEQDKNTQEVFAQVKQIYKTPPIKDFGGFNFSQILPDPSKPSKRSFIEDLLFNKVTLADAGFIKQYGDCLGDIAARDLICAQKFNGLTVLPPLLTDEMIAQYTSALLAGTITSGWTFGAGAALQIPFAMQMAYRFNGIGVTQNVLYENQKLIANQFNSAIGKIQDSLSSTASALGKLQNVVNQNAQALNTLVKQLSSNFGAISSVLNDILSRLDPPEAEVQIDRLITGRLQSLQTYVTQQLIRAAEIRASANLAATKMSECVLGQSKRVDFCGKGYHLMSFPQSAPHGVVFLHVTYVPAQEKNFTTAPAICHDGKAHFPREGVFVSNGTHWFVTQRNFYEPQIITTDNTFVSGNCDVVIGIVNNTVYDPLQPELDSFKEELDKYFKNHTSPDVDLGDISGINASVVNIQKEIDRLNEVAKNLNESLIDLQELGKYEQYIKWPWYIWLGFIAGLIAIVMVTIMLCCMTSCCSCLKGCCSCGSCCKFDEDDSEPVLKGVKLHYT

SEQ ID NO: 179 - protein, 1273 aa, synthetic construct
  REGION 1..1273: note = Recombinant SARS-CoV-2 S Polypeptide
MFVFLVLLPLVSSQCVNLTTRTQLPPAYTNSFTRGVYYPDKVFRSSVLHSTQDLFLPFFSNVTWFHAIHVSGTNGTKRFDNPVLPFNDGVYFASIEKSNIIRGWIFGTTLDSKTQSLLIVNNATNVVIKVCEFQFCNDPFLGVSNHKNNKSWMESEFRVYSSANNCTFEYVSQPFLMDLEGKQGNFKNLREFVFKNIDGYFKIYSKHTPINLVRDLPQGFSALEPLVDLPIGINITRFQTLLALHRSYLTPGDSSSGWTAGAAAYYVGYLQPRTFLLKYNENGTITDAVDCALDPLSETKCTLKSFTVEKGIYQTSNFRVQPTESIVRFPNITNLCPFGEVFNATKFASVYAWNRKRISNCVADYSVLYNSASFSTFKCYGVSPTKLNDLCFTNVYADSFVIRGDEVRQIAPGQTGKIADYNYKLPDDFTGCVIAWNSNNLDSKVGGNYNYLYRLFRKSNLKPFERDISTEIYQAGSTPCNGVKGFNCYFPLQSYGFQPTYGVGYQPYRVVVLSFELLHAPATVCGPKKSTNLVKNKCVNFNFNGLTGTGVLTESNKKFLPFQQFGRDIADTTDAVRDPQTLEILDITPCSFGGVSVITPGTNTSNQVAVLYQGVNCTEVPVAIHADQLTPTWRVYSTGSNVFQTRAGCLIGAEHVNNSYECDIPIGAGICASYQTQTNSHQQAQSVASQSIIAYTMSLGAENSVAYSNNSIAIPTNFTISVTTEILPVSMTKTSVDCTMYICGDSTECSNLLLQYGSFCTQLNRALTGIAVEQDKNTQEVFAQVKQIYKTPPIKDFGGFNFSQILPDPSKPSKRSFIEDLLFNKVTLADAGFIKQYGDCLGDIAARDLICAQKFNGLTVLPPLLTDEMIAQYTSALLAGTITSGWTFGAGAALQIPFAMQMAYRFNGIGVTQNVLYENQKLIANQFNSAIGKIQDSLSSTASALGKLQNVVNQNAQALNTLVKQLSSNFGAISSVLNDILSRLDPPEAEVQIDRLITGRLQSLQTYVTQQLIRAAEIRASANLAATKMSECVLGQSKRVDFCGKGYHLMSFPQSAPHGVVFLHVTYVPAQEKNFTTAPAICHDGKAHFPREGVFVSNGTHWFVTQRNFYEPQIITTDNTFVSGNCDVVIGIVNNTVYDPLQPELDSFKEELDKYFKNHTSPDVDLGDISGINASVVNIQKEIDRLNEVAKNLNESLIDLQELGKYEQYIKWPWYIWLGFIAGLIAIVMVTIMLCCMTSCCSCLKGCCSCGSCCKFDEDDSEPVLKGVKLHYT

SEQ ID NO: 180 - protein, 1274 aa, synthetic construct
  REGION 1..1274: note = Recombinant SARS-CoV-2 S Polypeptide
MFVFLVLLPLVSSQCVNLTTRTQLPPAYTNSFTRGVYYPDKVFRSSVLHSTQDLFLPFFSNVTWFHAIHVSGTNGTKRFDNPVLPFNDGVYFASIEKSNIIRGWIFGTTLDSKTQSLLIVNNATNVVIKVCEFQFCNDPFLGVTSNHKNNKSWMESEFRVYSSANNCTFEYVSQPFLMDLEGKQGNFKNLREFVFKNIDGYFKIYSKHTPINLVRDLPQGFSALEPLVDLPIGINITRFQTLLALHRSYLTPGDSSSGWTAGAAAYYVGYLQPRTFLLKYNENGTITDAVDCALDPLSETKCTLKSFTVEKGIYQTSNFRVQPTESIVRFPNITNLCPFGEVFNATKFASVYAWNRKRISNCVADYSVLYNSASFSTFKCYGVSPTKLNDLCFTNVYADSFVIRGDEVRQIAPGQTGKIADYNYKLPDDFTGCVIAWNSNNLDSKVGGNYNYLYRLFRKSNLKPFERDISTEIYQAGSTPCNGVKGFNCYFPLQSYGFQPTYGVGYQPYRVVVLSFELLHAPATVCGPKKSTNLVKNKCVNFNFNGLTGTGVLTESNKKFLPFQQFGRDIADTTDAVRDPQTLEILDITPCSFGGVSVITPGTNTSNQVAVLYQGVNCTEVPVAIHADQLTPTWRVYSTGSNVFQTRAGCLIGAEHVNNSYECDIPIGAGICASYQTQTNSHQQAQSVASQSIIAYTMSLGAENSVAYSNNSIAIPTNFTISVTTEILPVSMTKTSVDCTMYICGDSTECSNLLLQYGSFCTQLNRALTGIAVEQDKNTQEVFAQVKQIYKTPPIKDFGGFNFSQILPDPSKPSKRSFIEDLLFNKVTLADAGFIKQYGDCLGDIAARDLICAQKFNGLTVLPPLLTDEMIAQYTSALLAGTITSGWTFGAGAALQIPFAMQMAYRFNGIGVTQNVLYENQKLIANQFNSAIGKIQDSLSSTASALGKLQNVVNQNAQALNTLVKQLSSNFGAISSVLNDILSRLDPPEAEVQIDRLITGRLQSLQTYVTQQLIRAAEIRASANLAATKMSECVLGQSKRVDFCGKGYHLMSFPQSAPHGVVFLHVTYVPAQEKNFTTAPAICHDGKAHFPREGVFVSNGTHWFVTQRNFYEPQIITTDNTFVSGNCDVVIGIVNNTVYDPLQPELDSFKEELDKYFKNHTSPDVDLGDISGINASVVNIQKEIDRLNEVAKNLNESLIDLQELGKYEQYIKWPWYIWLGFIAGLIAIVMVTIMLCCMTSCCSCLKGCCSCGSCCKFDEDDSEPVLKGVKLHYT

SEQ ID NO: 181 - protein, 1260 aa, synthetic construct
  REGION 1..1260: note = Recombinant SARS-CoV-2 S Polypeptide
QCVNLTTRTQLPPAYTNSFTRGVYYPDKVFRSSVLHSTQDLFLPFFSNVTWFHAIHVSGTNGTKRFDNPVLPFNDGVYFASIEKSNIIRGWIFGTTLDSKTQSLLIVNNATNVVIKVCEFQFCNDPFLDVYYHKNNKSWMKSEFRVYSSANNCTFEYVSQPFLMDLEGKQGNFKNLREFVFKNIDGYFKIYSKHTPINLVRDLPQGFSALEPLVDLPIGINITRFQTLLALHRSYLTPGDSSSGWTAGAAAYYVGYLQPRTFLLKYNENGTITDAVDCALDPLSETKCTLKSFTVEKGIYQTSNFRVQPTESIVRFPNITNLCPFGEVFNATRFASVYAWNRKRISNCVADYSVLYNSASFSTFKCYGVSPTKLNDLCFTNVYADSFVIRGDEVRQIAPGQTGKIADYNYKLPDDFTGCVIAWNSNNLDSKVGGNYNYRYRLFRKSNLKPFERDISTEIYQAGSTPCNGVQGFNCYFPLQSYGFQPTNGVGYQPYRVVVLSFELLHAPATVCGPKKSTNLVKNKCVNFNFNGLTGTGVLTESNKKFLPFQQFGRDIADTTDAVRDPQTLEILDITPCSFGGVSVITPGTNTSNQVAVLYQGVNCTEVPVAIHADQLTPTWRVYSTGSNVFQTRAGCLIGAEHVNNSYECDIPIGAGICASYQTQTNSRQQAQSVASQSIIAYTMSLGAENSVAYSNNSIAIPTNFTISVTTEILPVSMTKTSVDCTMYICGDSTECSNLLLQYGSFCTQLNRALTGIAVEQDKNTQEVFAQVKQIYKTPPIKDFGGFNFSQILPDPSKPSKRSFIEDLLFNKVTLADAGFIKQYGDCLGDIAARDLICAQKFNGLTVLPPLLTDEMIAQYTSALLAGTITSGWTFGAGAALQIPFAMQMAYRFNGIGVTQNVLYENQKLIANQFNSAIGKIQDSLSSTASALGKLQDVVNQNAQALNTLVKQLSSNFGAISSVLNDILSRLDPPEAEVQIDRLITGRLQSLQTYVTQQLIRAAEIRASANLAATKMSECVLGQSKRVDFCGKGYHLMSFPQSAPHGVVFLHVTYVPAHEKNFTTAPAICHDGKAHFPREGVFVSNGTHWFVTQRNFYEPQIITTDNTFVSGNCDVVIGIVNNTVYDPLQPELDSFKEELDKYFKNHTSPDVDLGDISGINASVVNIQKEIDRLNEVAKNLNESLIDLQELGKYEQYIKWPWYIWLGFIAGLIAIVMVTIMLCCMTSCCSCLKGCCSCGSCCKFDEDDSEPVLKGVKLHYT

SEQ ID NO: 182 - protein, 1258 aa, synthetic construct
  REGION 1..1258: note = Recombinant SARS-CoV-2 S Polypeptide
QCVNLRTRTQLPPAYTNSFTRGVYYPDKVFRSSVLHSTQDLFLPFFSNVTWFHAIHVSGTNGTKRFDNPVLPFNDGVYFASTEKSNIIRGWIFGTTLDSKTQSLLIVNNATNVVIKVCEFQFCNDPFLDVYYHKNNKSWMESGVYSSANNCTFEYVSQPFLMDLEGKQGNFKNLREFVFKNIDGYFKIYSKHTPINLVRDLPQGFSALEPLVDLPIGINITRFQTLLALHRSYLTPGDSSSGITAGAAAYYVGYLQPRTFLLKYNENGTITDAVDCALDPLSETKCTLKSFTVEKGIYQTSNFRVQPTESIVRFPNITNLCPFGEVFNATRFASVYAWNRKRISNCVADYSVLYNSASFSTFKCYGVSPTKLNDLCFTNVYADSFVIRGDEVRQIAPGQTGNIADYNYKLPDDFTGCVIAWNSNNLDSKVGGNYNYRYRLFRKSNLKPFERDISTEIYQAGSKPCNGVEGFNCYFPLQSYGFQPTNGVGYQPYRVVVLSFELLHAPATVCGPKKSTNLVKNKCVNFNFNGLTGTGVLTESNKKFLPFQQFGRDIADTTDAVRDPQTLEILDITPCSFGGVSVITPGTNTSNQVAVLYQGVNCTEVPVAIHADQLTPTWRVYSTGSNVFQTRAGCLIGAEHVNNSYECDIPIGAGICASYQTQTNSRQQAQSVASQSIIAYTMSLGAENSVAYSNNSIAIPTNFTISVTTEILPVSMTKTSVDCTMYICGDSTECSNLLLQYGSFCTQLNRALTGIAVEQDKNTQEVFAQVKQIYKTPPIKDFGGFNFSQILPDPSKPSKRSFIEDLLFNKVTLADAGFIKQYGDCLGDIAARDLICAQKFNGLTVLPPLLTDEMIAQYTSALLAGTITSGWTFGAGAALQIPFAMQMAYRFNGIGVTQNVLYENQKLIANQFNSAIGKIQDSLSSTASALGKLQNVVNQNAQALNTLVKQLSSNFGAISSVLNDILSRLDPPEAEVQIDRLITGRLQSLQTYVTQQLIRAAEIRASANLAATKMSECVLGQSKRVDFCGKGYHLMSFPQSAPHGVVFLHVTYVPAQEKNFTTAPAICHDGKAHFPREGVFVSNGTHWFVTQRNFYEPQIITTDNTFVSGNCDVVIGIVNNTVYDPLQPELDSFKEELDKYFKNHTSPDVDLGDISGINASVVNIQKEIDRLNEVAKNLNESLIDLQELGKYEQYIKWPWYIWLGFIAGLIAIVMVTIMLCCMTSCCSCLKGCCSCGSCCKFDEDDSEPVLKGVKLHYT

SEQ ID NO: 183 - protein, 1260 aa, synthetic construct
  REGION 1..1260: note = Recombinant SARS-CoV-2 S Polypeptide
QCVNLTTRTQLPPAYTNSFTRGVYYPDKVFRSSVLHSTQDLFLPFFSNVTWFHAIHVSGTNGTKRFDNPVLPFNDGVYFASIEKSNIIRGWIFGTTLDSKTQSLLIVNNATNVVIKVCEFQFCNDPFLGVSNHKNNKSWMESEFRVYSSANNCTFEYVSQPFLMDLEGKQGNFKNLREFVFKNIDGYFKIYSKHTPINLVRDLPQGFSALEPLVDLPIGINITRFQTLLALHRSYLTPGDSSSGWTAGAAAYYVGYLQPRTFLLKYNENGTITDAVDCALDPLSETKCTLKSFTVEKGIYQTSNFRVQPTESIVRFPNITNLCPFGEVFNATKFASVYAWNRKRISNCVADYSVLYNSASFSTFKCYGVSPTKLNDLCFTNVYADSFVIRGDEVRQIAPGQTGKIADYNYKLPDDFTGCVIAWNSNNLDSKVGGNYNYLYRLFRKSNLKPFERDISTEIYQAGSTPCNGVKGFNCYFPLQSYGFQPTYGVGYQPYRVVVLSFELLHAPATVCGPKKSTNLVKNKCVNFNFNGLTGTGVLTESNKKFLPFQQFGRDIADTTDAVRDPQTLEILDITPCSFGGVSVITPGTNTSNQVAVLYQGVNCTEVPVAIHADQLTPTWRVYSTGSNVFQTRAGCLIGAEHVNNSYECDIPIGAGICASYQTQTNSHQQAQSVASQSIIAYTMSLGAENSVAYSNNSIAIPTNFTISVTTEILPVSMTKTSVDCTMYICGDSTECSNLLLQYGSFCTQLNRALTGIAVEQDKNTQEVFAQVKQIYKTPPIKDFGGFNFSQILPDPSKPSKRSFIEDLLFNKVTLADAGFIKQYGDCLGDIAARDLICAQKFNGLTVLPPLLTDEMIAQYTSALLAGTITSGWTFGAGAALQIPFAMQMAYRFNGIGVTQNVLYENQKLIANQFNSAIGKIQDSLSSTASALGKLQNVVNQNAQALNTLVKQLSSNFGAISSVLNDILSRLDPPEAEVQIDRLITGRLQSLQTYVTQQLIRAAEIRASANLAATKMSECVLGQSKRVDFCGKGYHLMSFPQSAPHGVVFLHVTYVPAQEKNFTTAPAICHDGKAHFPREGVFVSNGTHWFVTQRNFYEPQIITTDNTFVSGNCDVVIGIVNNTVYDPLQPELDSFKEELDKYFKNHTSPDVDLGDISGINASVVNIQKEIDRLNEVAKNLNESLIDLQELGKYEQYIKWPWYIWLGFIAGLIAIVMVTIMLCCMTSCCSCLKGCCSCGSCCKFDEDDSEPVLKGVKLHYT

SEQ ID NO: 184 - protein, 1261 aa, synthetic construct
  REGION 1..1261: note = Recombinant SARS-CoV-2 S Polypeptide
QCVNLTTRTQLPPAYTNSFTRGVYYPDKVFRSSVLHSTQDLFLPFFSNVTWFHAIHVSGTNGTKRFDNPVLPFNDGVYFASIEKSNIIRGWIFGTTLDSKTQSLLIVNNATNVVIKVCEFQFCNDPFLGVTSNHKNNKSWMESEFRVYSSANNCTFEYVSQPFLMDLEGKQGNFKNLREFVFKNIDGYFKIYSKHTPINLVRDLPQGFSALEPLVDLPIGINITRFQTLLALHRSYLTPGDSSSGWTAGAAAYYVGYLQPRTFLLKYNENGTITDAVDCALDPLSETKCTLKSFTVEKGIYQTSNFRVQPTESIVRFPNITNLCPFGEVFNATKFASVYAWNRKRISNCVADYSVLYNSASFSTFKCYGVSPTKLNDLCFTNVYADSFVIRGDEVRQIAPGQTGKIADYNYKLPDDFTGCVIAWNSNNLDSKVGGNYNYLYRLFRKSNLKPFERDISTEIYQAGSTPCNGVKGFNCYFPLQSYGFQPTYGVGYQPYRVVVLSFELLHAPATVCGPKKSTNLVKNKCVNFNFNGLTGTGVLTESNKKFLPFQQFGRDIADTTDAVRDPQTLEILDITPCSFGGVSVITPGTNTSNQVAVLYQGVNCTEVPVAIHADQLTPTWRVYSTGSNVFQTRAGCLIGAEHVNNSYECDIPIGAGICASYQTQTNSHQQAQSVASQSIIAYTMSLGAENSVAYSNNSIAIPTNFTISVTTEILPVSMTKTSVDCTMYICGDSTECSNLLLQYGSFCTQLNRALTGIAVEQDKNTQEVFAQVKQIYKTPPIKDFGGFNFSQILPDPSKPSKRSFIEDLLFNKVTLADAGFIKQYGDCLGDIAARDLICAQKFNGLTVLPPLLTDEMIAQYTSALLAGTITSGWTFGAGAALQIPFAMQMAYRFNGIGVTQNVLYENQKLIANQFNSAIGKIQDSLSSTASALGKLQNVVNQNAQALNTLVKQLSSNFGAISSVLNDILSRLDPPEAEVQIDRLITGRLQSLQTYVTQQLIRAAEIRASANLAATKMSECVLGQSKRVDFCGKGYHLMSFPQSAPHGVVFLHVTYVPAQEKNFTTAPAICHDGKAHFPREGVFVSNGTHWFVTQRNFYEPQIITTDNTFVSGNCDVVIGIVNNTVYDPLQPELDSFKEELDKYFKNHTSPDVDLGDISGINASVVNIQKEIDRLNEVAKNLNESLIDLQELGKYEQYIKWPWYIWLGFIAGLIAIVMVTIMLCCMTSCCSCLKGCCSCGSCCKFDEDDSEPVLKGVKLHYT

SEQ ID NO: 185 - protein, 1270 aa, synthetic construct
  REGION 1..1270: note = Recombinant SARS-CoV-2 S Polypeptide
MFVFLVLLPLVSSQCVNLITRTQSYTNSFTRGVYYPDKVFRSSVLHSTQDLFLPFFSNVTWFHAIHVSGTNGTKRFDNPVLPFNDGVYFASTEKSNIIRGWIFGTTLDSKTQSLLIVNNATNVVIKVCEFQFCNDPFLDVYYHKNNKSWMESEFRVYSSANNCTFEYVSQPFLMDLEGKQGNFKNLREFVFKNIDGYFKIYSKHTPINLGRDLPQGFSALEPLVDLPIGINITRFQTLLALHRSYLTPGDSSSGWTAGAAAYYVGYLQPRTFLLKYNENGTITDAVDCALDPLSETKCTLKSFTVEKGIYQTSNFRVQPTESIVRFPNITNLCPFDEVFNATRFASVYAWNRKRISNCVADYSVLYNFAPFFAFKCYGVSPTKLNDLCFTNVYADSFVIRGNEVRQIAPGQTGNIADYNYKLPDDFTGCVIAWNSNKLDSKVGGNYNYQYRLFRKSNLKPFERDISTEIYQAGNKPCNGVAGFNCYFPLRSYGFRPTYGVGHQPYRVVVLSFELLHAPATVCGPKKSTNLVKNKCVNFNFNGLTGTGVLTESNKKFLPFQQFGRDIADTTDAVRDPQTLEILDITPCSFGGVSVITPGTNTSNQVAVLYQGVNCTEVPVAIHADQLTPTWRVYSTGSNVFQTRAGCLIGAEYVNNSYECDIPIGAGICASYQTQTKSHQQAQSVASQSIIAYTMSLGAENLVAYSNNSIAIPTNFTISVTTEILPVSMTKTSVDCTMYICGDSTECSNLLLQYGSFCTQLKRALTGIAVEQDKNTQEVFAQVKQIYKTPPIKYFGGFNFSQILPDPSKPSKRSFIEDLLFNKVTLADAGFIKQYGDCLGDIAARDLICAQKFNGLTVLPPLLTDEMIAQYTSALLAGTITSGWTFGAGAALQIPFAMQMAYRFNGIGVTQNVLYENQKLIANQFNSAIGKIQDSLSSTASALGKLQDVVNHNAQALNTLVKQLSSKFGAISSVLNDILSRLDPPEAEVQIDRLITGRLQSLQTYVTQQLIRAAEIRASANLAATKMSECVLGQSKRVDFCGKGYHLMSFPQSAPHGVVFLHVTYVPAQEKNFTTAPAICHDGKAHFPREGVFVSNGTHWFVTQRNFYEPQIITTDNTFVSGNCDVVIGIVNNTVYDPLQPELDSFKEELDKYFKNHTSPDVDLGDISGINASVVNIQKEIDRLNEVAKNLNESLIDLQELGKYEQYIKWPWYIWLGFIAGLIAIVMVTIMLCCMTSCCSCLKGCCSCGSCCKFDEDDSEPVLKGVKLHYT

SEQ ID NO: 186 - protein, 1257 aa, synthetic construct
  REGION 1..1257: note = Recombinant SARS-CoV-2 S Polypeptide
QCVNLITRTQSYTNSFTRGVYYPDKVFRSSVLHSTQDLFLPFFSNVTWFHAIHVSGTNGTKRFDNPVLPFNDGVYFASTEKSNIIRGWIFGTTLDSKTQSLLIVNNATNVVIKVCEFQFCNDPFLDVYYHKNNKSWMESEFRVYSSANNCTFEYVSQPFLMDLEGKQGNFKNLREFVFKNIDGYFKIYSKHTPINLGRDLPQGFSALEPLVDLPIGINITRFQTLLALHRSYLTPGDSSSGWTAGAAAYYVGYLQPRTFLLKYNENGTITDAVDCALDPLSETKCTLKSFTVEKGIYQTSNFRVQPTESIVRFPNITNLCPFDEVFNATRFASVYAWNRKRISNCVADYSVLYNFAPFFAFKCYGVSPTKLNDLCFTNVYADSFVIRGNEVRQIAPGQTGNIADYNYKLPDDFTGCVIAWNSNKLDSKVGGNYNYQYRLFRKSNLKPFERDISTEIYQAGNKPCNGVAGFNCYFPLRSYGFRPTYGVGHQPYRVVVLSFELLHAPATVCGPKKSTNLVKNKCVNFNFNGLTGTGVLTESNKKFLPFQQFGRDIADTTDAVRDPQTLEILDITPCSFGGVSVITPGTNTSNQVAVLYQGVNCTEVPVAIHADQLTPTWRVYSTGSNVFQTRAGCLIGAEYVNNSYECDIPIGAGICASYQTQTKSHQQAQSVASQSIIAYTMSLGAENLVAYSNNSIAIPTNFTISVTTEILPVSMTKTSVDCTMYICGDSTECSNLLLQYGSFCTQLKRALTGIAVEQDKNTQEVFAQVKQIYKTPPIKYFGGFNFSQILPDPSKPSKRSFIEDLLFNKVTLADAGFIKQYGDCLGDIAARDLICAQKFNGLTVLPPLLTDEMIAQYTSALLAGTITSGWTFGAGAALQIPFAMQMAYRFNGIGVTQNVLYENQKLIANQFNSAIGKIQDSLSSTASALGKLQDVVNHNAQALNTLVKQLSSKFGAISSVLNDILSRLDPPEAEVQIDRLITGRLQSLQTYVTQQLIRAAEIRASANLAATKMSECVLGQSKRVDFCGKGYHLMSFPQSAPHGVVFLHVTYVPAQEKNFTTAPAICHDGKAHFPREGVFVSNGTHWFVTQRNFYEPQIITTDNTFVSGNCDVVIGIVNNTVYDPLQPELDSFKEELDKYFKNHTSPDVDLGDISGINASVVNIQKEIDRLNEVAKNLNESLIDLQELGKYEQYIKWPWYIWLGFIAGLIAIVMVTIMLCCMTSCCSCLKGCCSCGSCCKFDEDDSEPVLKGVKLHYT

SEQ ID NO: 187 - protein, 1270 aa, synthetic construct; identical to SEQ ID NO: 170
  REGION 1..1270: note = Recombinant SARS-CoV-2 S Polypeptide

SEQ ID NO: 188 - protein, 1257 aa, synthetic construct
  REGION 1..1257: note = Recombinant SARS-CoV-2 S Polypeptide
QCVNLTTRTQLPPAYTNSFTRGVYYPDKVFRSSVLHSTQDLFLPFFSNVTWFHVISGTNGTKRFDNPVLPFNDGVYFASIEKSNIIRGWIFGTTLDSKTQSLLIVNNATNVVIKVCEFQFCNDPFLDHKNNKSWMESEFRVYSSANNCTFEYVSQPFLMDLEGKQGNFKNLREFVFKNIDGYFKIYSKHTPIIVREPEDLPQGFSALEPLVDLPIGINITRFQTLLALHRSYLTPGDSSSGWTAGAAAYYVGYLQPRTFLLKYNENGTITDAVDCALDPLSETKCTLKSFTVEKGIYQTSNFRVQPTESIVRFPNITNLCPFDEVFNATRFASVYAWNRKRISNCVADYSVLYNSAPFFTFKCYGVSPTKLNDLCFTNVYADSFVIRGDEVRQIAPGQTGNIADYNYKLPDDFTGCVIAWNSNKLDSKVSGNYNYLYRLFRKSNLKPFERDISTEIYQAGNKPCNGVAGFNCYFPLRSYSFRPTYGVGHQPYRVVVLSFELLHAPATVCGPKKSTNLVKNKCVNFNFNGLKGTGVLTESNKKFLPFQQFGRDIADTTDAVRDPQTLEILDITPCSFGGVSVITPGTNTSNQVAVLYQGVNCTEVPVAIHADQLTPTWRVYSTGSNVFQTRAGCLIGAEYVNNSYECDIPIGAGICASYQTQTKSHQQAQSVASQSIIAYTMSLGAENSVAYSNNSIAIPTNFTISVTTEILPVSMTKTSVDCTMYICGDSTECSNLLLQYGSFCTQLKRALTGIAVEQDKNTQEVFAQVKQIYKTPPIKYFGGFNFSQILPDPSKPSKRSFIEDLLFNKVTLADAGFIKQYGDCLGDIAARDLICAQKFKGLTVLPPLLTDEMIAQYTSALLAGTITSGWTFGAGAALQIPFAMQMAYRFNGIGVTQNVLYENQKLIANQFNSAIGKIQDSLSSTASALGKLQDVVNHNAQALNTLVKQLSSKFGAISSVLNDIFSRLDPPEAEVQIDRLITGRLQSLQTYVTQQLIRAAEIRASANLAATKMSECVLGQSKRVDFCGKGYHLMSFPQSAPHGVVFLHVTYVPAQEKNFTTAPAICHDGKAHFPREGVFVSNGTHWFVTQRNFYEPQIITTDNTFVSGNCDVVIGIVNNTVYDPLQPELDSFKEELDKYFKNHTSPDVDLGDISGINASVVNIQKEIDRLNEVAKNLNESLIDLQELGKYEQYIKWPWYIWLGFIAGLIAIVMVTIMLCCMTSCCSCLKGCCSCGSCCKFDEDDSEPVLKGVKLHYT

SEQ ID NO: 189 - protein, 1268 aa, synthetic construct
  REGION 1..1268: note = Recombinant SARS-CoV-2 S Polypeptide
MFGFLVLLPLVSSQCVNLITRTQSYTNSFTRGVYYPDKVFRSSVLHSTQDLFLPFFSNVTWFHAISGTNGTKRFDNPVLPFNDGVYFASTEKSNIIRGWIFGTTLDSKTQSLLIVNNATNVVIKVCEFQFCNDPFLDVYYHKNNKSWMESEFRVYSSANNCTFEYVSQPFLMDLEGKQGNFKNLREFVFKNIDGYFKIYSKHTPINLGRDLPQGFSALEPLVDLPIGINITRFQTLLALHRSYLTPGDSSSGWTAGAAAYYVGYLQPRTFLLKYNENGTITDAVDCALDPLSETKCTLKSFTVEKGIYQTSNFRVQPTESIVRFPNITNLCPFDEVFNATRFASVYAWNRKRISNCVADYSVLYNFAPFFAFKCYGVSPTKLNDLCFTNVYADSFVIRGNEVSQIAPGQTGNIADYNYKLPDDFTGCVIAWNSNNLDSKVGGNYNYRYRLFRKSNLKPFERDISTEIYQAGNKPCNGVAGVNCYFPLQSYGFRPTYGVGHQPYRVVVLSFELLHAPATVCGPKKSTNLVKNKCVNFNFNGLTGTGVLTESNKKFLPFQQFGRDIADTTDAVRDPQTLEILDITPCSFGGVSVITPGTNTSNQVAVLYQGVNCTEVPVAIHADQLTPTWRVYSTVSNVFQTRAGCLIGAEYVNNSYECDIPIGAGICASYQTQTKSHQQAQSVASQSIIAYTMSLGAENSVAYSNNSIAIPTNFTISVTTEILPVSMTKTSVDCTMYICGDSTECSNLLLQYGSFCTQLKRALTGIAVEQDKNTQEVFAQVKQIYKTPPIKYFGGFNFSQILPDPSKPSKRSFIEDLLFNKVTLADAGFIKQYGDCLGDIAARDLICAQKFNGLTVLPPLLTDEMIAQYTSALLAGTITSGWTFGAGAALQIPFAMQMAYRFNGIGVTQNVLYENQKLIANQFNSAIGKIQDSLSSTASALGKLQDVVNHNAQALNTLVKQLSSKFGAISSVLNDILSRLDPPEAEVQIDRLITGRLQSLQTYVTQQLIRAAEIRASANLAATKMSECVLGQSKRVDFCGKGYHLMSFPQSAPHGVVFLHVTYVPAQEKNFTTAPAICHDGKAHFPREGVFVSNGTHWFVTQRNFYEPQIITTDNTFVSGNCDVVIGIVNNTVYDPLQPELDSFKEELDKYFKNHTSPDVDLGDISGINASVVNIQKEIDRLNEVAKNLNESLIDLQELGKYEQYIKWPWYIWLGFIAGLIAIVMVTIMLCCMTSCCSCLKGCCSCGSCCKFDEDDSEPVLKGVKLHYT

SEQ ID NO: 190 - protein, 1255 aa, synthetic construct
  REGION 1..1255: note = Recombinant SARS-CoV-2 S Polypeptide
QCVNLITRTQSYTNSFTRGVYYPDKVFRSSVLHSTQDLFLPFFSNVTWFHAISGTNGTKRFDNPVLPFNDGVYFASTEKSNIIRGWIFGTTLDSKTQSLLIVNNATNVVIKVCEFQFCNDPFLDVYYHKNNKSWMESEFRVYSSANNCTFEYVSQPFLMDLEGKQGNFKNLREFVFKNIDGYFKIYSKHTPINLGRDLPQGFSALEPLVDLPIGINITRFQTLLALHRSYLTPGDSSSGWTAGAAAYYVGYLQPRTFLLKYNENGTITDAVDCALDPLSETKCTLKSFTVEKGIYQTSNFRVQPTESIVRFPNITNLCPFDEVFNATRFASVYAWNRKRISNCVADYSVLYNFAPFFAFKCYGVSPTKLNDLCFTNVYADSFVIRGNEVSQIAPGQTGNIADYNYKLPDDFTGCVIAWNSNNLDSKVGGNYNYRYRLFRKSNLKPFERDISTEIYQAGNKPCNGVAGVNCYFPLQSYGFRPTYGVGHQPYRVVVLSFELLHAPATVCGPKKSTNLVKNKCVNFNFNGLTGTGVLTESNKKFLPFQQFGRDIADTTDAVRDPQTLEILDITPCSFGGVSVITPGTNTSNQVAVLYQGVNCTEVPVAIHADQLTPTWRVYSTVSNVFQTRAGCLIGAEYVNNSYECDIPIGAGICASYQTQTKSHQQAQSVASQSIIAYTMSLGAENSVAYSNNSIAIPTNFTISVTTEILPVSMTKTSVDCTMYICGDSTECSNLLLQYGSFCTQLKRALTGIAVEQDKNTQEVFAQVKQIYKTPPIKYFGGFNFSQILPDPSKPSKRSFIEDLLFNKVTLADAGFIKQYGDCLGDIAARDLICAQKFNGLTVLPPLLTDEMIAQYTSALLAGTITSGWTFGAGAALQIPFAMQMAYRFNGIGVTQNVLYENQKLIANQFNSAIGKIQDSLSSTASALGKLQDVVNHNAQALNTLVKQLSSKFGAISSVLNDILSRLDPPEAEVQIDRLITGRLQSLQTYVTQQLIRAAEIRASANLAATKMSECVLGQSKRVDFCGKGYHLMSFPQSAPHGVVFLHVTYVPAQEKNFTTAPAICHDGKAHFPREGVFVSNGTHWFVTQRNFYEPQIITTDNTFVSGNCDVVIGIVNNTVYDPLQPELDSFKEELDKYFKNHTSPDVDLGDISGINASVVNIQKEIDRLNEVAKNLNESLIDLQELGKYEQYIKWPWYIWLGFIAGLIAIVMVTIMLCCMTSCCSCLKGCCSCGSCCKFDEDDSEPVLKGVKLHYT

SEQ ID NO: 191 - protein, 1268 aa, synthetic construct
  REGION 1..1268: note = Recombinant SARS-CoV-2 S Polypeptide
MFVFLVLLPLVSSQCVNLITRTQSYTNSFTRGVYYPDKVFRSSVLHSTQDLFLPFFSNVTWFHAISGTNGTKRFDNPVLPFNDGVYFASTEKSNIIRGWIFGTTLDSKTQSLLIVNNATNVVIKVCEFQFCNDPFLDVYYHKNNKSWMESEFRVYSSANNCTFEYVSQPFLMDLEGKQGNFKNLREFVFKNIDGYFKIYSKHTPINLGRDLPQGFSALEPLVDLPIGINITRFQTLLALHRSYLTPGDSSSGWTAGAAAYYVGYLQPRTFLLKYNENGTITDAVDCALDPLSETKCTLKSFTVEKGIYQTSNFRVQPTESIVRFPNITNLCPFDEVFNATRFASVYAWNRKRISNCVADYSVLYNFAPFFAFKCYGVSPTKLNDLCFTNVYADSFVIRGNEVSQIAPGQTGNIADYNYKLPDDFTGCVIAWNSNKLDSKVGGNYNYRYRLFRKSNLKPFERDISTEIYQAGNKPCNGVAGVNCYFPLQSYGFRPTYGVGHQPYRVVVLSFELLHAPATVCGPKKSTNLVKNKCVNFNFNGLTGTGVLTESNKKFLPFQQFGRDIADTTDAVRDPQTLEILDITPCSFGGVSVITPGTNTSNQVAVLYQGVNCTEVPVAIHADQLTPTWRVYSTGSNVFQTRAGCLIGAEYVNNSYECDIPIGAGICASYQTQTKSHQQAQSVASQSIIAYTMSLGAENSVAYSNNSIAIPTNFTISVTTEILPVSMTKTSVDCTMYICGDSTECSNLLLQYGSFCTQLKRALTGIAVEQDKNTQEVFAQVKQIYKTPPIKYFGGFNFSQILPDPSKPSKRSFIEDLLFNKVTLADAGFIKQYGDCLGDIAARDLICAQKFNGLTVLPPLLTDEMIAQYTSALLAGTITSGWTFGAGAALQIPFAMQMAYRFNGIGVTQNVLYENQKLIANQFNSAIGKIQDSLSSTASALGKLQDVVNHNAQALNTLVKQLSSKFGAISSVLNDILSRLDPPEAEVQIDRLITGRLQSLQTYVTQQLIRAAEIRASANLAATKMSECVLGQSKRVDFCGKGYHLMSFPQSAPHGVVFLHVTYVPAQEKNFTTAPAICHDGKAHFPREGVFVSNGTHWFVTQRNFYEPQIITTDNTFVSGNCDVVIGIVNNTVYDPLQPELDSFKEELDKYFKNHTSPDVDLGDISGINASVVNIQKEIDRLNEVAKNLNESLIDLQELGKYEQYIKWPWYIWLGFIAGLIAIVMVTIMLCCMTSCCSCLKGCCSCGSCCKFDEDDSEPVLKGVKLHYT

SEQ ID NO: 192 - protein, 1255 aa, synthetic construct
  REGION 1..1255: note = Recombinant SARS-CoV-2 S Polypeptide
QCVNLITRTQSYTNSFTRGVYYPDKVFRSSVLHSTQDLFLPFFSNVTWFHAISGTNGTKRFDNPVLPFNDGVYFASTEKSNIIRGWIFGTTLDSKTQSLLIVNNATNVVIKVCEFQFCNDPFLDVYYHKNNKSWMESEFRVYSSANNCTFEYVSQPFLMDLEGKQGNFKNLREFVFKNIDGYFKIYSKHTPINLGRDLPQGFSALEPLVDLPIGINITRFQTLLALHRSYLTPGDSSSGWTAGAAAYYVGYLQPRTFLLKYNENGTITDAVDCALDPLSETKCTLKSFTVEKGIYQTSNFRVQPTESIVRFPNITNLCPFDEVFNATRFASVYAWNRKRISNCVADYSVLYNFAPFFAFKCYGVSPTKLNDLCFTNVYADSFVIRGNEVSQIAPGQTGNIADYNYKLPDDFTGCVIAWNSNKLDSKVGGNYNYRYRLFRKSNLKPFERDISTEIYQAGNKPCNGVAGVNCYFPLQSYGFRPTYGVGHQPYRVVVLSFELLHAPATVCGPKKSTNLVKNKCVNFNFNGLTGTGVLTESNKKFLPFQQFGRDIADTTDAVRDPQTLEILDITPCSFGGVSVITPGTNTSNQVAVLYQGVNCTEVPVAIHADQLTPTWRVYSTGSNVFQTRAGCLIGAEYVNNSYECDIPIGAGICASYQTQTKSHQQAQSVASQSIIAYTMSLGAENSVAYSNNSIAIPTNFTISVTTEILPVSMTKTSVDCTMYICGDSTECSNLLLQYGSFCTQLKRALTGIAVEQDKNTQEVFAQVKQIYKTPPIKYFGGFNFSQILPDPSKPSKRSFIEDLLFNKVTLADAGFIKQYGDCLGDIAARDLICAQKFNGLTVLPPLLTDEMIAQYTSALLAGTITSGWTFGAGAALQIPFAMQMAYRFNGIGVTQNVLYENQKLIANQFNSAIGKIQDSLSSTASALGKLQDVVNHNAQALNTLVKQLSSKFGAISSVLNDILSRLDPPEAEVQIDRLITGRLQSLQTYVTQQLIRAAEIRASANLAATKMSECVLGQSKRVDFCGKGYHLMSFPQSAPHGVVFLHVTYVPAQEKNFTTAPAICHDGKAHFPREGVFVSNGTHWFVTQRNFYEPQIITTDNTFVSGNCDVVIGIVNNTVYDPLQPELDSFKEELDKYFKNHTSPDVDLGDISGINASVVNIQKEIDRLNEVAKNLNESLIDLQELGKYEQYIKWPWYIWLGFIAGLIAIVMVTIMLCCMTSCCSCLKGCCSCGSCCKFDEDDSEPVLKGVKLHYT

SEQ ID NO: 193 - protein, 13 aa, synthetic construct
  REGION 1..13: note = signal peptide
MFGFLVLLPLVSS

SEQ ID NO: 194 - protein, 1270 aa, synthetic construct
  REGION 1..1270: note = Recombinant SARS-CoV-2 S Polypeptide
MFVFLVLLPLVSSQCVNLITRTQSYTNSFTRGVYYPDKVFRSSVLHSTQDLFLPFFSNVTWFHAIHVSGTNGTKRFDNPVLPFNDGVYFASTEKSNIIRGWIFGTTLDSKTQSLLIVNNATNVVIKVCEFQFCNDPFLDVYYHKNNKSWMESEFRVYSSANNCTFEYVSQPFLMDLEGKQGNFKNLREFVFKNIDGYFKIYSKHTPINLGRDLPQGFSALEPLVDLPIGINITRFQTLLALHRSYLTPGDSSSGWTAGAAAYYVGYLQPRTFLLKYNENGTITDAVDCALDPLSETKCTLKSFTVEKGIYQTSNFRVQPTESIVRFPNITNLCPFDEVFNATRFASVYAWNRKRISNCVADYSVLYNFAPFFAFKCYGVSPTKLNDLCFTNVYADSFVIRGNEVSQIAPGQTGNIADYNYKLPDDFTGCVIAWNSNKLDSKVGGNYNYLYRLFRKSNLKPFERDISTEIYQAGNKPCNGVAGFNCYFPLRSYGFRPTYGVGHQPYRVVVLSFELLHAPATVCGPKKSTNLVKNKCVNFNFNGLTGTGVLTESNKKFLPFQQFGRDIADTTDAVRDPQTLEILDITPCSFGGVSVITPGTNTSNQVAVLYQGVNCTEVPVAIHADQLTPTWRVYSTGSNVFQTRAGCLIGAEYVNNSYECDIPIGAGICASYQTQTKSHQQAQSVASQSIIAYTMSLGAENSVAYSNNSIAIPTNFTISVTTEILPVSMTKTSVDCTMYICGDSTECSNLLLQYGSFCTQLKRALTGIAVEQDKNTQEVFAQVKQIYKTPPIKYFGGFNFSQILPDPSKPSKRSFIEDLLFNKVTLADAGFIKQYGDCLGDIAARDLICAQKFNGLTVLPPLLTDEMIAQYTSALLAGTITSGWTFGAGAALQIPFAMQMAYRFNGIGVTQNVLYENQKLIANQFNSAIGKIQDSLSSTASALGKLQDVVNHNAQALNTLVKQLSSKFGAISSVLNDILSRLDPPEAEVQIDRLITGRLQSLQTYVTQQLIRAAEIRASANLAATKMSECVLGQSKRVDFCGKGYHLMSFPQSAPHGVVFLHVTYVPAQEKNFTTAPAICHDGKAHFPREGVFVSNGTHWFVTQRNFYEPQIITTDNTFVSGNCDVVIGIVNNTVYDPLQPELDSFKEELDKYFKNHTSPDVDLGDISGINASVVNIQKEIDRLNEVAKNLNESLIDLQELGKYEQYIKWPWYIWLGFIAGLIAIVMVTIMLCCMTSCCSCLKGCCSCGSCCKFDEDDSEPVLKGVKLHYT

SEQ ID NO: 195 - protein, 1257 aa, synthetic construct
  REGION 1..1257: note = Recombinant SARS-CoV-2 S Polypeptide
QCVNLITRTQSYTNSFTRGVYYPDKVFRSSVLHSTQDLFLPFFSNVTWFHAIHVSGTNGTKRFDNPVLPFNDGVYFASTEKSNIIRGWIFGTTLDSKTQSLLIVNNATNVVIKVCEFQFCNDPFLDVYYHKNNKSWMESEFRVYSSANNCTFEYVSQPFLMDLEGKQGNFKNLREFVFKNIDGYFKIYSKHTPINLGRDLPQGFSALEPLVDLPIGINITRFQTLLALHRSYLTPGDSSSGWTAGAAAYYVGYLQPRTFLLKYNENGTITDAVDCALDPLSETKCTLKSFTVEKGIYQTSNFRVQPTESIVRFPNITNLCPFDEVFNATRFASVYAWNRKRISNCVADYSVLYNFAPFFAFKCYGVSPTKLNDLCFTNVYADSFVIRGNEVSQIAPGQTGNIADYNYKLPDDFTGCVIAWNSNKLDSKVGGNYNYLYRLFRKSNLKPFERDISTEIYQAGNKPCNGVAGFNCYFPLRSYGFRPTYGVGHQPYRVVVLSFELLHAPATVCGPKKSTNLVKNKCVNFNFNGLTGTGVLTESNKKFLPFQQFGRDIADTTDAVRDPQTLEILDITPCSFGGVSVITPGTNTSNQVAVLYQGVNCTEVPVAIHADQLTPTWRVYSTGSNVFQTRAGCLIGAEYVNNSYECDIPIGAGICASYQTQTKSHQQAQSVASQSIIAYTMSLGAENSVAYSNNSIAIPTNFTISVTTEILPVSMTKTSVDCTMYICGDSTECSNLLLQYGSFCTQLKRALTGIAVEQDKNTQEVFAQVKQIYKTPPIKYFGGFNFSQILPDPSKPSKRSFIEDLLFNKVTLADAGFIKQYGDCLGDIAARDLICAQKFNGLTVLPPLLTDEMIAQYTSALLAGTITSGWTFGAGAALQIPFAMQMAYRFNGIGVTQNVLYENQKLIANQFNSAIGKIQDSLSSTASALGKLQDVVNHNAQALNTLVKQLSSKFGAISSVLNDILSRLDPPEAEVQIDRLITGRLQSLQTYVTQQLIRAAEIRASANLAATKMSECVLGQSKRVDFCGKGYHLMSFPQSAPHGVVFLHVTYVPAQEKNFTTAPAICHDGKAHFPREGVFVSNGTHWFVTQRNFYEPQIITTDNTFVSGNCDVVIGIVNNTVYDPLQPELDSFKEELDKYFKNHTSPDVDLGDISGINASVVNIQKEIDRLNEVAKNLNESLIDLQELGKYEQYIKWPWYIWLGFIAGLIAIVMVTIMLCCMTSCCSCLKGCCSCGSCCKFDEDDSEPVLKGVKLHYT

SEQ ID NO: 196 - DNA, 3813 bp, synthetic construct
  source 1..3813: mol_type = other DNA
atgttcgtcttcctggtgctgctgcccctggtgtccagccagtgcgtgaacctgaccactaggactcagctgcctcccgcttacaccaactcattcactcgcggtgtgtactaccctgacaaggtcttccgttcttcagtgctgcactcaactcaggacctgttcctgcccttcttctccaacgtcacctggttccacgtcatctccggcaccaacggcactaagcgcttcgacaacccagtgctgcctttcaacgacggtgtctacttcgcttcaattgagaagtccaacatcatccgtggatggatcttcggcaccactctggacagcaagactcagtctctgctgatcgtcaacaacgccaccaacgtggtcatcaaggtctgcgaattccagttctgcaacgacccattcctggaccacaagaacaacaagtcatggatggagtccgaattccgcgtctactccagcgctaacaactgcactttcgagtacgtgtcccagcctttcctgatggacctggaaggaaagcagggtaacttcaagaacctgagggagttcgtgttcaagaacatcgacggatacttcaagatttacagcaagcacaccccaatcattgtgcgcgagccggaggacctgcctcagggtttctctgctctggagccactggtggacctgcctatcggcatcaacatcacccgcttccagactctgctggctctgcaccgttcctacctgactccaggcgactcatcttctggatggactgctggagctgctgcttactacgtgggctacctgcagcctcgcaccttcctgctgaagtacaacgaaaacggaaccatcactgacgccgtcgactgcgctctggaccctctgtcagaaaccaagtgcactctgaagtccttcaccgtggagaagggcatctaccagacttcaaacttcagggtgcagcccaccgaatccatcgtcagattccctaacatcactaacctgtgccccttcgacgaggtcttcaacgccacccgcttcgcttccgtgtacgcctggaacaggaagagaatctcaaactgcgtcgctgactactccgtgctgtacaaccttgccccgttctttaccttcaagtgctacggcgtgtcaccaactaagctgaacgacctgtgcttcaccaacgtctacgccgactccttcgtgatcaggggagacgaggtcagacagatcgctcctggccagactggaaatatcgccgactacaactacaagctgcccgacgacttcaccggttgcgtcatcgcttggaacagcaacaaactggactctaaagtgagtggcaactacaactacctgtaccgcctgttccgtaagtcaaacctgaagccattcgagagggacatcagcactgaaatctaccaggccggaaataaaccttgcaacggtgtcgcgggcttcaactgctacttccccctgaggtcctactctttccgaccaacttatggtgtgggccaccagccttacagagtggtcgtgctgagcttcgaactgctccacgctcctgctactgtgtgcggtccaaagaagtctaccaacctggtcaagaacaagtgcgtgaacttcaacttcaacggcctgaaaggaactggtgtcctgaccgagagcaacaagaagttcctgcccttccagcagttcggaagggacatcgctgacaccactgacgctgtgcgcgaccctcagaccctggaaatcctggacatcactccatgctcattcggaggtgtctccgtgatcacccctggcaccaacacttctaaccaggtcgctgtgctgtaccagggcgtcaactgcaccgaggtccctgtggccatccacgctgaccagctgacccccacttggcgcgtgtactccaccggcagcaacgtgttccagactcgtgctggttgcctgatcggcgccgagtacgtgaacaacagctacgaatgcgacatccccatcggcgctggaatctgcgcctcttaccagacccagactaagagccaccagcaggctcagtctgtggcctctcagtcaatcatcgcttacaccatgtcactgggcgctgaaaactccgtggcctactctaacaactcaatcgccatccccaccaacttcactatcagcgtgaccactgagatcctgccagtcagcatgaccaagacttctgtggactgcactatgtacatctgcggagacagcaccgaatgctctaacctgctgctgcagtacggctctttctgcacccagctgaagcgtgctctgactggaatcgccgtggagcaggacaagaacactcaggaagtcttcgctcaggtgaagcaaatctacaagaccccacctatcaagtacttcggcggattcaacttctcccagatcctgcctgacccctccaagccaagcaagcgctctttcatcgaggacctgctgttcaacaaggtcactctggccgacgctggattcatcaagcagtacggagactgcctgggtgacatcgccgctcgtgacctgatctgcgctcagaagttcaagggtctgaccgtgctgcccccactgctgactgacgaaatgatcgcccagtacactagcgccctgctggctggaaccatcacttctggttggaccttcggtgctggcgccgctctgcagatccctttcgctatgcagatggcctaccgtttcaacggaatcggtgtcacccagaacgtgctgtacgagaaccagaagctgatcgctaaccagttcaactcagccatcggaaagatccaggacagcctgagctctactgcctctgctctgggcaagctgcaggacgtcgtgaaccataacgcccaggctctgaacaccctggtcaagcagctgtcatccaagttcggtgctatcagctctgtgctgaacgacatcttctcccgcctggaccctcccgaggccgaagtgcagatcgaccgcctgatcactggccgtctgcagtcactgcagacctacgtgactcagcagctgatcagggccgctgaaatcagagcctccgctaacctggccgctaccaagatgagcgagtgcgtcctgggtcaatctaagcgtgtggacttctgcggcaagggataccacctgatgtcattccctcagtctgctccccacggtgtggtgttcctgcacgtcacctacgtgccagcccaggagaagaacttcaccactgcccctgctatctgccacgacggcaaggctcacttccccagggaaggtgtcttcgtgagcaacggcacccactggttcgtcactcagagaaacttctacgagccacagatcatcaccactgacaacactttcgtgtctggaaactgcgacgtggtcatcggtatcgtcaacaacaccgtgtacgaccccctgcagccagagctggactcattcaaggaggaactggacaagtacttcaagaaccacacctcccctgacgtcgacctgggcgacatctcaggaatcaacgcttccgtcgtgaacatccagaaggagatcgaccgcctgaacgaagtggccaagaacctgaacgaaagcctgatcgacctgcaggagctgggcaagtacgaacagtacatcaagtggccttggtacatctggctgggtttcatcgctggcctcatcgctatcgtgatggtgaccatcatgctgtgctgcatgacttcatgctgctcctgcctgaagggctgctgcagctgcggatcttgctgcaagttcgacgaggacgactctgaacccgtcctgaagggcgtgaagctgcactacacctaa

SEQ ID NO: 197 - DNA, 3813 bp, synthetic construct
  source 1..3813: mol_type = other DNA
atgttcgtcttcctggtgctgctgcctctggtctccagccagtgcgtgaacctgatcaccaggactcagtcctacaccaacagcttcactagaggtgtgtactaccctgacaaggtcttccgctcttcagtgctgcactctactcaggacctgttcctgcccttcttctcaaacgtcacctggttccacgccatccacgtgtccggcaccaacggcactaagagattcgacaacccagtgctgcctttcaacgacggcgtctacttcgcttctaccgagaagtcaaacatcatccgcggatggatcttcggcaccactctggactccaagactcagagcctgctgatcgtcaacaacgccaccaacgtggtcatcaaggtgtgcgaattccagttctgcaacgacccattcctggacgtgtactaccacaagaacaacaagtcttggatggagtcagaattcagagtctactccagcgctaacaactgcactttcgagtacgtgtctcagcctttcctgatggacctggaaggaaagcagggtaacttcaagaacctgcgtgagttcgtcttcaagaacatcgacggttacttcaagatttactctaagcacaccccaatcaacctgggtagggacctgcctcagggcttctcagctctggagccactggtggacctgcctatcggcatcaacatcaccaggttccagactctgctggctctgcacagaagctacctgactccaggagactcatcttctggatggactgctggagctgctgcttactacgtgggttacctgcagcctcgcaccttcctgctgaagtacaacgaaaacggcaccatcactgacgccgtcgactgcgctctggaccctctgtctgaaaccaagtgcactctgaagtcattcaccgtggagaagggcatctaccagacttccaacttccgcgtgcagcccaccgaaagcatcgtccgtttccctaacatcactaacctgtgccccttcgacgaggtcttcaacgccacccgtttcgcttctgtgtacgcctggaaccgcaagcgtatctctaactgcgtcgccgactactcagtgctgtacaacttcgctcccttcttcgccttcaagtgctacggagtgtcaccaactaagctgaacgacctgtgcttcaccaacgtctacgctgactctttcgtgatcaggggtaacgaggtctcacagatcgctccaggccagactggaaacatcgccgactacaactacaagctgcctgacgacttcaccggttgcgtcatcgcttggaactccaacaagctggacagcaaagtgggtggcaactacaactacctgtacaggctgttcagaaagtccaacctgaagcccttcgagcgtgacatcagcactgaaatctaccaggctggtaacaagccatgcaacggtgtcgccggcttcaactgctacttccccctgcgctcctacggcttccgtccaacctacggtgtgggccaccagccttacagggtggtcgtgctgtccttcgaactcctccacgctccagctactgtgtgcggaccaaagaagagcaccaacctggtcaagaacaagtgcgtgaacttcaacttcaacggtctgaccggaactggtgtcctgaccgagtctaacaagaagttcctgcccttccagcagttcggtcgtgacatcgctgacactaccgacgccgtgagggacccccagaccctggaaatcctggacatcactccatgctctttcggaggtgtctcagtgatcactccaggaaccaacacttcaaaccaggtcgctgtgctgtaccagggtgtcaactgcaccgaagtccctgtggccatccacgctgaccagctgacccccacttggagagtgtacagcaccggctctaacgtcttccagactcgcgctggttgcctgatcggcgccgagtacgtgaacaactcttacgaatgcgacatccccatcggcgctggaatctgcgcctcataccagacccagactaagtcccaccagcaggctcagagcgtcgcctcacagtccatcatcgcttacaccatgtctctgggcgctgaaaactcagtggcctactcaaacaactccatcgccatccctaccaacttcactatctccgtgaccactgagatcctgcccgtctccatgaccaagactagcgtggactgcactatgtacatctgcggagactccaccgaatgcagcaacctgctgctgcagtacggtagcttctgcacccagctgaagcgtgctctgactggcatcgccgtggagcaggacaagaacactcaggaagtcttcgctcaggtgaagcaaatctacaagacccctcccatcaagtacttcggcggattcaacttctcccagatcctgcctgaccccagcaagccatctaagagatcattcatcgaggacctgctgttcaacaaggtcactctggccgacgctggtttcatcaagcagtacggagactgcctgggtgacatcgccgctcgcgacctgatctgcgctcagaagttcaacggcctgaccgtgctgccacctctgctgactgacgaaatgatcgcccagtacacttccgccctgctggctggaaccatcacttctggttggaccttcggtgctggtgctgctctgcagatccctttcgctatgcagatggcctacaggttcaacggaatcggtgtcacccagaacgtgctgtacgagaaccagaagctgatcgctaaccagttcaactccgccatcggcaagatccaggactccctgagctctactgccagcgctctgggaaagctgcaggacgtcgtgaaccacaacgcccaggctctgaacaccctggtcaagcagctgtcatccaagttcggagctatcagctctgtgctgaacgacatcctctcccgcctggaccctcctgaggctgaagtccagatcgacaggctgatcactggtagactgcagtctctgcagacctacgtgactcagcagctgatccgcgccgctgaaatccgtgcctcagctaacctggccgctaccaagatgtctgagtgcgtcctgggccagagcaagagggtggacttctgcggcaagggataccacctgatgtctttccctcagtcagctccccacggagtcgtgttcctgcacgtcacctacgtgccagcccaggagaagaacttcaccactgcccctgctatctgccacgacggcaaggctcacttcccccgtgaaggagtcttcgtgtccaacggcacccactggttcgtcactcagaggaacttctacgagccacagatcatcaccactgacaacactttcgtgagcggcaactgcgacgtggtcatcggtatcgtcaacaacaccgtgtacgaccccctgcagccagagctggactccttcaaggaagagctggacaagtacttcaagaaccacaccagcccagacgtcgacctgggcgacatctctggaatcaacgcttcagtcgtgaacatccagaaggagatcgaccgtctgaacgaagtggccaagaacctgaacgaatctctgatcgacctgcaggagctgggaaagtacgaacagtacatcaagtggccttggtacatctggctgggtttcatcgctggcctcatcgctatcgtgatggtgaccatcatgctgtgctgcatgacttcctgctgcagctgcctgaagggctgctgctcttgcggatcatgctgcaagttcgacgaggacgactcagaacccgtcctgaagggcgtgaagctgcactacacctaa

SEQ ID NO: 198 - DNA, 3807 bp, synthetic construct
  source 1..3807: mol_type = other DNA
atgttcgtcttcctggtgctgctgcctctggtctccagccagtgcgtgaacctgatcaccaggactcagtcctacaccaacagcttcactagaggtgtgtactaccctgacaaggtcttccgctcttcagtgctgcactctactcaggacctgttcctgcccttcttctcaaacgtcacctggttccacgccatctccggcaccaacggcactaagagattcgacaacccagtgctgcctttcaacgacggcgtctacttcgcttctaccgagaagtcaaacatcatccgcggatggatcttcggcaccactctggactccaagactcagagcctgctgatcgtcaacaacgccaccaacgtggtcatcaaggtgtgcgaattccagttctgcaacgacccattcctggacgtgtactaccacaagaacaacaagtcttggatggagtcagaattcagagtctactccagcgctaacaactgcactttcgagtacgtgtctcagcctttcctgatggacctggaaggaaagcagggtaacttcaagaacctgcgtgagttcgtcttcaagaacatcgacggttacttcaagatttactctaagcacaccccaatcaacctgggtagggacctgcctcagggcttctcagctctggagccactggtggacctgcctatcggcatcaacatcaccaggttccagactctgctggctctgcacagaagctacctgactccaggagactcatcttctggatggactgctggagctgctgcttactacgtgggttacctgcagcctcgcaccttcctgctgaagtacaacgaaaacggcaccatcactgacgccgtcgactgcgctctggaccctctgtctgaaaccaagtgcactctgaagtcattcaccgtggagaagggcatctaccagacttccaacttccgcgtgcagcccaccgaaagcatcgtccgtttccctaacatcactaacctgtgccccttcgacgaggtcttcaacgccacccgtttcgcttctgtgtacgcctggaaccgcaagcgtatctctaactgcgtcgccgactactcagtgctgtacaacttcgctcccttcttcgccttcaagtgctacggagtgtcaccaactaagctgaacgacctgtgcttcaccaacgtctacgctgactctttcgtgatcaggggtaacgaggtctcacagatcgctccaggccagactggaaacatcgccgactacaactacaagctgcctgacgacttcaccggttgcgtcatcgcttggaactccaacaagctggacagcaaagtgggtggcaactacaactaccgttacaggctgttcagaaagtccaacctgaagcccttcgagcgtgacatcagcactgaaatctaccaggctggtaacaagccatgcaacggtgtcgccggcgtcaactgctacttccccctgcagtcctacggcttccgtccaacctacggtgtgggccaccagccttacagggtggtcgtgctgtccttcgaactcctccacgctccagctactgtgtgcggaccaaagaagagcaccaacctggtcaagaacaagtgcgtgaacttcaacttcaacggtctgaccggaactggtgtcctgaccgagtctaacaagaagttcctgcccttccagcagttcggtcgtgacatcgctgacactaccgacgccgtgagggacccccagaccctggaaatcctggacatcactccatgctctttcggaggtgtctcagtgatcactccaggaaccaacacttcaaaccaggtcgctgtgctgtaccagggtgtcaactgcaccgaagtccctgtggccatccacgctgaccagctgacccccacttggagagtgtacagcaccggctctaacgtcttccagactcgcgctggttgcctgatcggcgccgagtacgtgaacaactcttacgaatgcgacatccccatcggcgctggaatctgcgcctcataccagacccagactaagtcccaccagcaggctcagagcgtcgcctcacagtccatcatcgcttacaccatgtctctgggcgctgaaaactcagtggcctactcaaacaactccatcgccatccctaccaacttcactatctccgtgaccactgagatcctgcccgtctccatgaccaagactagcgtggactgcactatgtacatctgcggagactccaccgaatgcagcaacctgctgctgcagtacggtagcttctgcacccagctgaagcgtgctctgactggcatcgccgtggagcaggacaagaacactcaggaagtcttcgctcaggtgaagcaaatctacaagacccctcccatcaagtacttcggcggattcaacttctcccagatcctgcctgaccccagcaagccatctaagagatcattcatcgaggacctgctgttcaacaaggtcactctggccgacgctggtttcatcaagcagtacggagactgcctgggtgacatcgccgctcgcgacctgatctgcgctcagaagttcaacggcctgaccgtgctgccacctctgctgactgacgaaatgatcgcccagtacacttccgccctgctggctggaaccatcacttctggttggaccttcggtgctggtgctgctctgcagatccctttcgctatgcagatggcctacaggttcaacggaatcggtgtcacccagaacgtgctgtacgagaaccagaagctgatcgctaaccagttcaactccgccatcggcaagatccaggactccctgagctctactgccagcgctctgggaaagctgcaggacgtcgtgaaccacaacgcccaggctctgaacaccctggtcaagcagctgtcatccaagttcggagctatcagctctgtgctgaacgacatcctctcccgcctggaccctcctgaggctgaagtccagatcgacaggctgatcactggtagactgcagtctctgcagacctacgtgactcagcagctgatccgcgccgctgaaatccgtgcctcagctaacctggccgctaccaagatgtctgagtgcgtcctgggccagagcaagagggtggacttctgcggcaagggataccacctgatgtctttccctcagtcagctccccacggagtcgtgttcctgcacgtcacctacgtgccagcccaggagaagaacttcaccactgcccctgctatctgccacgacggcaaggctcacttcccccgtgaaggagtcttcgtgtccaacggcacccactggttcgtcactcagaggaacttctacgagccacagatcatcaccactgacaacactttcgtgagcggcaactgcgacgtggtcatcggtatcgtcaacaacaccgtgtacgaccccctgcagccagagctggactccttcaaggaagagctggacaagtacttcaagaaccacaccagcccagacgtcgacctgggcgacatctctggaatcaacgcttcagtcgtgaacatccagaaggagatcgaccgtctgaacgaagtggccaagaacctgaacgaatctctgatcgacctgcaggagctgggaaagtacgaacagtacatcaagtggccttggtacatctggctgggtttcatcgctggcctcatcgctatcgtgatggtgaccatcatgctgtgctgcatgacttcctgctgcagctgcctgaagggctgctgctcttgcggatcatgctgcaagttcgacgaggacgactcagaacccgtcctgaagggcgtgaagctgcactacacctaa

SEQ ID NO: 199 - DNA, 3807 bp, synthetic construct
  source 1..3807: mol_type = other DNA
atgttcggtttcctggtgctgctgcctctggtctccagccagtgcgtgaacctgatcaccaggactcagtcctacaccaacagcttcactagaggtgtgtactaccctgacaaggtcttccgctcttcagtgctgcactctactcaggacctgttcctgcccttcttctcaaacgtcacctggttccacgccatctccggcaccaacggcactaagagattcgacaacccagtgctgcctttcaacgacggcgtctacttcgcttctaccgagaagtcaaacatcatccgcggatggatcttcggcaccactctggactccaagactcagagcctgctgatcgtcaacaacgccaccaacgtggtcatcaaggtgtgcgaattccagttctgcaacgacccattcctggacgtgtactaccacaagaacaacaagtcttggatggagtcagaattcagagtctactccagcgctaacaactgcactttcgagtacgtgtctcagcctttcctgatggacctggaaggaaagcagggtaacttcaagaacctgcgtgagttcgtcttcaagaacatcgacggttacttcaagatttactctaagcacaccccaatcaacctgggtagggacctgcctcagggcttctcagctctggagccactggtggacctgcctatcggcatcaacatcaccaggttccagactctgctggctctgcacagaagctacctgactccaggagactcatcttctggatggactgctggagctgctgcttactacgtgggttacctgcagcctcgcaccttcctgctgaagtacaacgaaaacggcaccatcactgacgccgtcgactgcgctctggaccctctgtctgaaaccaagtgcactctgaagtcattcaccgtggagaagggcatctaccagacttccaacttccgcgtgcagcccaccgaaagcatcgtccgtttccctaacatcactaacctgtgccccttcgacgaggtcttcaacgccacccgtttcgcttctgtgtacgcctggaaccgcaagcgtatctctaactgcgtcgccgactactcagtgctgtacaacttcgctcccttcttcgccttcaagtgctacggagtgtcaccaactaagctgaacgacctgtgcttcaccaacgtctacgctgactctttcgtgatcaggggtaacgaggtctcacagatcgctccaggccagactggaaacatcgccgactacaactacaagctgcctgacgacttcaccggttgcgtcatcgcttggaactccaacaacctggacagcaaagtgggtggcaactacaactaccgttacaggctgttcagaaagtccaacctgaagcccttcgagcgtgacatcagcactgaaatctaccaggctggtaacaagccatgcaacggtgtcgccggcgtcaactgctacttccccctgcagtcctacggcttccgtccaacctacggtgtgggccaccagccttacagggtggtcgtgctgtccttcgaactcctccacgctccagctactgtgtgcggaccaaagaagagcaccaacctggtcaagaacaagtgcgtgaacttcaacttcaacggtctgaccggaactggtgtcctgaccgagtctaacaagaagttcctgcccttccagcagttcggtcgtgacatcgctgacactaccgacgccgtgagggacccccagaccctggaaatcctggacatcactccatgctctttcggaggtgtctcagtgatcactccaggaaccaacacttcaaaccaggtcgctgtgctgtaccagggtgtcaactgcaccgaagtccctgtggccatccacgctgaccagctgacccccacttggagagtgtacagcaccgtgtctaacgtcttccagactcgcgctggttgcctgatcggcgccgagtacgtgaacaactcttacgaatgcgacatccccatcggcgctggaatctgcgcctcataccagacccagactaagtcccaccagcaggctcagagcgtcgcctcacagtccatcatcgcttacaccatgtctctgggcgctgaaaactcagtggcctactcaaacaactccatcgccatccctaccaacttcactatctccgtgaccactgagatcctgcccgtctccatgaccaagactagcgtggactgcactatgtacatctgcggagactccaccgaatgcagcaacctgctgctgcagtacggtagcttctgcacccagctgaagcgtgctctgactggcatcgccgtggagcaggacaagaacactcaggaagtcttcgctcaggtgaagcaaatctacaagacccctcccatcaagtacttcggcggattcaacttctcccagatcctgcctgaccccagcaagccatctaagagatcattcatcgaggacctgctgttcaacaaggtcactctggccgacgctggtttcatcaagcagtacggagactgcctgggtgacatcgccgctcgcgacctgatctgcgctcagaagttcaacggcctgaccgtgctgccacctctgctgactgacgaaatgatcgcccagtacacttccgccctgctggctggaaccatcacttctggttggaccttcggtgctggtgctgctctgcagatccctttcgctatgcagatggcctacaggttcaacggaatcggtgtcacccagaacgtgctgtacgagaaccagaagctgatcgctaaccagttcaactccgccatcggcaagatccaggactccctgagctctactgccagcgctctgggaaagctgcaggacgtcgtgaaccacaacgcccaggctctgaacaccctggtcaagcagctgtcatccaagttcggagctatcagctctgtgctgaacgacatcctctcccgcctggaccctcctgaggctgaagtccagatcgacaggctgatcactggtagactgcagtctctgcagacctacgtgactcagcagctgatccgcgccgctgaaatccgtgcctcagctaacctggccgctaccaagatgtctgagtgcgtcctgggccagagcaagagggtggacttctgcggcaagggataccacctgatgtctttccctcagtcagctccccacggagtcgtgttcctgcacgtcacctacgtgccagcccaggagaagaacttcaccactgcccctgctatctgccacgacggcaaggctcacttcccccgtgaaggagtcttcgtgtccaacggcacccactggttcgtcactcagaggaacttctacgagccacagatcatcaccactgacaacactttcgtgagcggcaactgcgacgtggtcatcggtatcgtcaacaacaccgtgtacgaccccctgcagccagagctggactccttcaaggaagagctggacaagtacttcaagaaccacaccagcccagacgtcgacctgggcgacatctctggaatcaacgcttcagtcgtgaacatccagaaggagatcgaccgtctgaacgaagtggccaagaacctgaacgaatctctgatcgacctgcaggagctgggaaagtacgaacagtacatcaagtggccttggtacatctggctgggtttcatcgctggcctcatcgctatcgtgatggtgaccatcatgctgtgctgcatgacttcctgctgcagctgcctgaagggctgctgctcttgcggatcatgctgcaagttcgacgaggacgactcagaacccgtcctgaagggcgtgaagctgcactacacctaa

SEQ ID NO: 200 - protein, 1270 aa, synthetic construct
MFVFLVLLPLVSSQCVNLITRTQSYTNSFTRGVYYPDKVFRSSVLHSTQDLFLPFFSNVTWFHAIHVSGTNGTKRFDNPVLPFNDGVYFASTEKSNIIRGWIFGTTLDSKTQSLLIVNNATNVVIKVCEFQFCNDPFLDVYYHKNNKSWMESEFRVYSSANNCTFEYVSQPFLMDLEGKQGNFKNLREFVFKNIDGYFKIYSKHTPINLGRDLPQGFSALEPLVDLPIGINITRFQTLLALHRSYLTPGDSSSGWTAGAAAYYVGYLQPRTFLLKYNENGTITDAVDCALDPLSETKCTLKSFTVEKGIYQTSNFRVQPTESIVRFPNITNLCPFDEVFNATRFASVYAWNRKRISNCVADYSVLYNFAPFFAFKCYGVSPTKLNDLCFTNVYADSFVIRGNEVSQIAPGQTGNIADYNYKLPDDFTGCVIAWNSNKLDSKVGGNYNYQYRLFRKSNLKPFERDISTEIYQAGNKPCNGVAGFNCYFPLRSYGFRPTYGVGHQPYRVVVLSFELLHAPATVCGPKKSTNLVKNKCVNFNFNGLTGTGVLTESNKKFLPFQQFGRDIADTTDAVRDPQTLEILDITPCSFGGVSVITPGTNTSNQVAVLYQGVNCTEVPVAIHADQLTPTWRVYSTGSNVFQTRAGCLIGAEYVNNSYECDIPIGAGICASYQTQTKSHQQAQSVASQSIIAYTMSLGAENLVAYSNNSIAIPTNFTISVTTEILPVSMTKTSVDCTMYICGDSTECSNLLLQYGSFCTQLKRALTGIAVEQDKNTQEVFAQVKQIYKTPPIKYFGGFNFSQILPDPSKPSKRSFIEDLLFNKVTLADAGFIKQYGDCLGDIAARDLICAQKFNGLTVLPPLLTDEMIAQYTSALLAGTITSGWTFGAGAALQIPFAMQMAYRFNGIGVTQNVLYENQKLIANQFNSAIGKIQDSLSSTASALGKLQDVVNHNAQALNTLVKQLSSKFGAISSVLNDILSRLDPPEAEVQIDRLITGRLQSLQTYVTQQLIRAAEIRASANLAATKMSECVLGQSKRVDFCGKGYHLMSFPQSAPHGVVFLHVTYVPAQEKNFTTAPAICHDGKAHFPREGVFVSNGTHWFVTQRNFYEPQIITTDNTFVSGNCDVVIGIVNNTVYDPLQPELDSFKEELDKYFKNHTSPDVDLGDISGINASVVNIQKEIDRLNEVAKNLNESLIDLQELGKYEQYIKWPWYIWLGFIAGLIAIVMVTIMLCCMTSCCSCLKGCCSCGSCCKFDEDDSEPVLKGVKLHYT

SEQ ID NO: 201 - DNA, 3813 bp, synthetic construct
  source 1..3813: mol_type = other DNA
atgttcgtcttcctggtgctgctgcctctggtctccagccagtgcgtgaacctgatcaccaggactcagtcctacaccaacagcttcactagaggtgtgtactaccctgacaaggtcttccgctcttcagtgctgcactctactcaggacctgttcctgcccttcttctcaaacgtcacctggttccacgccatccacgtgtccggcaccaacggcactaagagattcgacaacccagtgctgcctttcaacgacggcgtctacttcgcttctaccgagaagtcaaacatcatccgcggatggatcttcggcaccactctggactccaagactcagagcctgctgatcgtcaacaacgccaccaacgtggtcatcaaggtgtgcgaattccagttctgcaacgacccattcctggacgtgtactaccacaagaacaacaagtcttggatggagtcagaattcagagtctactccagcgctaacaactgcactttcgagtacgtgtctcagcctttcctgatggacctggaaggaaagcagggtaacttcaagaacctgcgtgagttcgtcttcaagaacatcgacggttacttcaagatttactctaagcacaccccaatcaacctgggtagggacctgcctcagggcttctcagctctggagccactggtggacctgcctatcggcatcaacatcaccaggttccagactctgctggctctgcacagaagctacctgactccaggagactcatcttctggatggactgctggagctgctgcttactacgtgggttacctgcagcctcgcaccttcctgctgaagtacaacgaaaacggcaccatcactgacgccgtcgactgcgctctggaccctctgtctgaaaccaagtgcactctgaagtcattcaccgtggagaagggcatctaccagacttccaacttccgcgtgcagcccaccgaaagcatcgtccgtttccctaacatcactaacctgtgccccttcgacgaggtcttcaacgccacccgtttcgcttctgtgtacgcctggaaccgcaagcgtatctctaactgcgtcgccgactactcagtgctgtacaacttcgctcccttcttcgccttcaagtgctacggagtgtcaccaactaagctgaacgacctgtgcttcaccaacgtctacgctgactctttcgtgatcaggggtaacgaggtctcacagatcgctccaggccagactggaaacatcgccgactacaactacaagctgcctgacgacttcaccggttgcgtcatcgcttggaactccaacaagctggacagcaaagtgggtggcaactacaactaccagtacaggctgttcagaaagtccaacctgaagcccttcgagcgtgacatcagcactgaaatctaccaggctggtaacaagccatgcaacggtgtcgccggcttcaactgctacttccccctgcgctcctacggcttccgtccaacctacggtgtgggccaccagccttacagggtggtcgtgctgtccttcgaactcctccacgctccagctactgtgtgcggaccaaagaagagcaccaacctggtcaagaacaagtgcgtgaacttcaacttcaacggtctgaccggaactggtgtcctgaccgagtctaacaagaagttcctgcccttccagcagttcggtcgtgacatcgctgacactaccgacgccgtgagggacccccagaccctggaaatcctggacatcactccatgctctttcggaggtgtctcagtgatcactccaggaaccaacacttcaaaccaggtcgctgtgctgtaccagggtgtcaactgcaccgaagtccctgtggccatccacgctgaccagctgacccccacttggagagtgtacagcaccggctctaacgtcttccagactcgcgctggttgcctgatcggcgccgagtacgtgaacaactcttacgaatgcgacatccccatcggcgctggaatctgcgcctcataccagacccagactaagtcccaccagcaggctcagagcgtcgcctcacagtccatcatcgcttacaccatgtctctgggcgctgaaaacctggtggcctactcaaacaactccatcgccatccctaccaacttcactatctccgtgaccactgagatcctgcccgtctccatgaccaagactagcgtggactgcactatgtacatctgcggagactccaccgaatgcagcaacctgctgctgcagtacggtagcttctgcacccagctgaagcgtgctctgactggcatcgccgtggagcaggacaagaacactcaggaagtcttcgctcaggtgaagcaaatctacaagacccctcccatcaagtacttcggcggattcaacttctcccagatcctgcctgaccccagcaagccatctaagagatcattcatcgaggacctgctgttcaacaaggtcactctggccgacgctggtttcatcaagcagtacggagactgcctgggtgacatcgccgctcgcgacctgatctgcgctcagaagttcaacggcctgaccgtgctgccacctctgctgactgacgaaatgatcgcccagtacacttccgccctgctggctggaaccatcacttctggttggaccttcggtgctggtgctgctctgcagatccctttcgctatgcagatggcctacaggttcaacggaatcggtgtcacccagaacgtgctgtacgagaaccagaagctgatcgctaaccagttcaactccgccatcggcaagatccaggactccctgagctctactgccagcgctctgggaaagctgcaggacgtcgtgaaccacaacgcccaggctctgaacaccctggtcaagcagctgtcatccaagttcggagctatcagctctgtgctgaacgacatcctctcccgcctggaccctcctgaggctgaagtccagatcgacaggctgatcactggtagactgcagtctctgcagacctacgtgactcagcagctgatccgcgccgctgaaatccgtgcctcagctaacctggccgctaccaagatgtctgagtgcgtcctgggccagagcaagagggtggacttctgcggcaagggataccacctgatgtctttccctcagtcagctccccacggagtcgtgttcctgcacgtcacctacgtgccagcccaggagaagaacttcaccactgcccctgctatctgccacgacggcaaggctcacttcccccgtgaaggagtcttcgtgtccaacggcacccactggttcgtcactcagaggaacttctacgagccacagatcatcaccactgacaacactttcgtgagcggcaactgcgacgtggtcatcggtatcgtcaacaacaccgtgtacgaccccctgcagccagagctggactccttcaaggaagagctggacaagtacttcaagaaccacaccagcccagacgtcgacctgggcgacatctctggaatcaacgcttcagtcgtgaacatccagaaggagatcgaccgtctgaacgaagtggccaagaacctgaacgaatctctgatcgacctgcaggagctgggaaagtacgaacagtacatcaagtggccttggtacatctggctgggtttcatcgctggcctcatcgctatcgtgatggtgaccatcatgctgtgctgcatgacttcctgctgcagctgcctgaagggctgctgctcttgcggatcatgctgcaagttcgacgaggacgactcagaacccgtcctgaagggcgtgaagctgcactacacctaa

SEQ ID NO: 202 - DNA, 3813 bp, synthetic construct
  source 1..3813: mol_type = other DNA
atgttcgtcttcctggtgctgctgcctctggtctccagccagtgcgtgaacctgatcaccaggactcagtcctacaccaacagcttcactagaggtgtgtactaccctgacaaggtcttccgctcttcagtgctgcactctactcaggacctgttcctgcccttcttctcaaacgtcacctggttccacgccatccacgtgtccggcaccaacggcactaagagattcgacaacccagtgctgcctttcaacgacggcgtctacttcgcttctaccgagaagtcaaacatcatccgcggatggatcttcggcaccactctggactccaagactcagagcctgctgatcgtcaacaacgccaccaacgtggtcatcaaggtgtgcgaattccagttctgcaacgacccattcctggacgtgtactaccacaagaacaacaagtcttggatggagtcagaattcagagtctactccagcgctaacaactgcactttcgagtacgtgtctcagcctttcctgatggacctggaaggaaagcagggtaacttcaagaacctgcgtgagttcgtcttcaagaacatcgacggttacttcaagatttactctaagcacaccccaatcaacctgggtagggacctgcctcagggcttctcagctctggagccactggtggacctgcctatcggcatcaacatcaccaggttccagactctgctggctctgcacagaagctacctgactccaggagactcatcttctggatggactgctggagctgctgcttactacgtgggttacctgcagcctcgcaccttcctgctgaagtacaacgaaaacggcaccatcactgacgccgtcgactgcgctctggaccctctgtctgaaaccaagtgcactctgaagtcattcaccgtggagaagggcatctaccagacttccaacttccgcgtgcagcccaccgaaagcatcgtccgtttccctaacatcactaacctgtgccccttcgacgaggtcttcaacgccacccgtttcgcttctgtgtacgcctggaaccgcaagcgtatctctaactgcgtcgccgactactcagtgctgtacaacttcgctcccttcttcgccttcaagtgctacggagtgtcaccaactaagctgaacgacctgtgcttcaccaacgtctacgctgactctttcgtgatcaggggtaacgaggtccgtcagatcgctccaggccagactggaaacatcgccgactacaactacaagctgcctgacgacttcaccggttgcgtcatcgcttggaactccaacaagctggacagcaaagtgggtggcaactacaactaccagtacaggctgttcagaaagtccaacctgaagcccttcgagcgtgacatcagcactgaaatctaccaggctggtaacaagccatgcaacggtgtcgccggcttcaactgctacttccccctgcgctcctacggcttccgtccaacctacggtgtgggccaccagccttacagggtggtcgtgctgtccttcgaactcctccacgctccagctactgtgtgcggaccaaagaagagcaccaacctggtcaagaacaagtgcgtgaacttcaacttcaacggtctgaccggaactggtgtcctgaccgagtctaacaagaagttcctgcccttccagcagttcggtcgtgacatcgctgacactaccgacgccgtgagggacccccagaccctggaaatcctggacatcactccatgctctttcggaggtgtctcagtgatcactccaggaaccaacacttcaaaccaggtcgctgtgctgtaccagggtgtcaactgcaccgaagtccctgtggccatccacgctgaccagctgacccccacttggagagtgtacagcaccggctctaacgtcttccagactcgcgctggttgcctgatcggcgccgagtacgtgaacaactcttacgaatgcgacatccccatcggcgctggaatctgcgcctcataccagacccagactaagtcccaccagcaggctcagagcgtcgcctcacagtccatcatcgcttacaccatgtctctgggcgctgaaaacctggtggcctactcaaacaactccatcgccatccctaccaacttcactatctccgtgaccactgagatcctgcccgtctccatgaccaagactagcgtggactgcactatgtacatctgcggagactccaccgaatgcagcaacctgctgctgcagtacggtagcttctgcacccagctgaagcgtgctctgactggcatcgccgtggagcaggacaagaacactcaggaagtcttcgctcaggtgaagcaaatctacaagacccctcccatcaagtacttcggcggattcaacttctcccagatcctgcctgaccccagcaagccatctaagagatcattcatcgaggacctgctgttcaacaaggtcactctggccgacgctggtttcatcaagcagtacggagactgcctgggtgacatcgccgctcgcgacctgatctgcgctcagaagttcaacggcctgaccgtgctgccacctctgctgactgacgaaatgatcgcccagtacacttccgccctgctggctggaaccatcacttctggttggaccttcggtgctggtgctgctctgcagatccctttcgctatgcagatggcctacaggttcaacggaatcggtgtcacccagaacgtgctgtacgagaaccagaagctgatcgctaaccagttcaactccgccatcggcaagatccaggactccctgagctctactgccagcgctctgggaaagctgcaggacgtcgtgaaccacaacgcccaggctctgaacaccctggtcaagcagctgtcatccaagttcggagctatcagctctgtgctgaacgacatcctctcccgcctggaccctcctgaggctgaagtccagatcgacaggctgatcactggtagactgcagtctctgcagacctacgtgactcagcagctgatccgcgccgctgaaatccgtgcctcagctaacctggccgctaccaagatgtctgagtgcgtcctgggccagagcaagagggtggacttctgcggcaagggataccacctgatgtctttccctcagtcagctccccacggagtcgtgttcctgcacgtcacctacgtgccagcccaggagaagaacttcaccactgcccctgctatctgccacgacggcaaggctcacttcccccgtgaaggagtcttcgtgtccaacggcacccactggttcgtcactcagaggaacttctacgagccacagatcatcaccactgacaacactttcgtgagcggcaactgcgacgtggtcatcggtatcgtcaacaacaccgtgtacgaccccctgcagccagagctggactccttcaaggaagagctggacaagtacttcaagaaccacaccagcccagacgtcgacctgggcgacatctctggaatcaacgcttcagtcgtgaacatccagaaggagatcgaccgtctgaacgaagtggccaagaacctgaacgaatctctgatcgacctgcaggagctgggaaagtacgaacagtacatcaagtggccttggtacatctggctgggtttcatcgctggcctcatcgctatcgtgatggtgaccatcatgctgtgctgcatgacttcctgctgcagctgcctgaagggctgctgctcttgcggatcatgctgcaagttcgacgaggacgactcagaacccgtcctgaagggcgtgaagctgcactacacctaa

SEQ ID NO: 203 - protein, 1268 aa, synthetic construct
MFVFLVLLPLVSSQCVNLITRTQSYTNSFTRGVYYPDKVFRSSVLHSTQDLFLPFFSNVTWFHAISGTNGTKRFDNPVLPFNDGVYFASTEKSNIIRGWIFGTTLDSKTQSLLIVNNATNVVIKVCEFQFCNDPFLDVYYHKNNKSWMESEFRVYSSANNCTFEYVSQPFLMDLEGKQGNFKNLREFVFKNIDGYFKIYSKHTPINLGRDLPQGFSALEPLVDLPIGINITRFQTLLALHRSYLTPGDSSSGWTAGAAAYYVGYLQPRTFLLKYNENGTITDAVDCALDPLSETKCTLKSFTVEKGIYQTSNFRVQPTESIVRFPNITNLCPFDEVFNATTFASVYAWNRKRISNCVADYSVLYNFAPFFAFKCYGVSPTKLNDLCFTNVYADSFVIRGNEVSQIAPGQTGNIADYNYKLPDDFTGCVIAWNSNKLDSKVGGNYNYRYRLFRKSNLKPFERDISTEIYQAGNKPCNGVAGVNCYFPLQSYGFRPTYGVGHQPYRVVVLSFELLHAPATVCGPKKSTNLVKNKCVNFNFNGLTGTGVLTESNKKFLPFQQFGRDIADTTDAVRDPQTLEILDITPCSFGGVSVITPGTNTSNQVAVLYQGVNCTEVPVAIHADQLTPTWRVYSTGSNVFQTRAGCLIGAEYVNSSYECDIPIGAGICASYQTQTKSHQQAQSVASQSIIAYTMSLGAENSVAYSNNSIAIPTNFTISVTTEILPVSMTKTSVDCTMYICGDSTECSNLLLQYGSFCTQLKRALTGIAVEQDKNTQEVFAQVKQIYKTPPIKYFGGFNFSQILPDPSKPSKRSFIEDLLFNKVTLADAGFIKQYGDCLGDIAARDLICAQKFNGLTVLPPLLTDEMIAQYTSALLAGTITSGWTFGAGAALQIPFAMQMAYRFNGIGVTQNVLYENQKLIANQFNSAIGKIQDSLSSTASALGKLQDVVNHNAQALNTLVKQLSSKFGAISSVLNDILSRLDPPEAEVQIDRLITGRLQSLQTYVTQQLIRAAEIRASANLAATKMSECVLGQSKRVDFCGKGYHLMSFPQSAPHGVVFLHVTYVPAQEKNFTTAPAICHDGKAHFPREGVFVSNGTHWFVTQRNFYEPQIITTDNTFVSGNCDVVIGIVNNTVYDPLQPELDSFKEELDKYFKNHTSPDVDLGDISGINASVVNIQKEIDRLNEVAKNLNESLIDLQELGKYEQYIKWPWYIWLGFIAGLIAIVMVTIMLCCMTSCCSCLKGCCSCGSCCKFDEDDSEPVLKGVKLHYT

SEQ ID NO: 204 - DNA, 3807 bp, synthetic construct
  source 1..3807: mol_type = other DNA
atgttcgtcttcctggtgctgctgcctctggtctccagccagtgcgtgaacctgatcaccaggactcagtcctacaccaacagcttcactagaggtgtgtactaccctgacaaggtcttccgctcttcagtgctgcactctactcaggacctgttcctgcccttcttctcaaacgtcacctggttccacgccatctccggcaccaacggcactaagagattcgacaacccagtgctgcctttcaacgacggcgtctacttcgcttctaccgagaagtcaaacatcatccgcggatggatcttcggcaccactctggactccaagactcagagcctgctgatcgtcaacaacgccaccaacgtggtcatcaaggtgtgcgaattccagttctgcaacgacccattcctggacgtgtactaccacaagaacaacaagtcttggatggagtcagaattcagagtctactccagcgctaacaactgcactttcgagtacgtgtctcagcctttcctgatggacctggaaggaaagcagggtaacttcaagaacctgcgtgagttcgtcttcaagaacatcgacggttacttcaagatttactctaagcacaccccaatcaacctgggtagggacctgcctcagggcttctcagctctggagccactggtggacctgcctatcggcatcaacatcaccaggttccagactctgctggctctgcacagaagctacctgactccaggagactcatcttctggatggactgctggagctgctgcttactacgtgggttacctgcagcctcgcaccttcctgctgaagtacaacgaaaacggcaccatcactgacgccgtcgactgcgctctggaccctctgtctgaaaccaagtgcactctgaagtcattcaccgtggagaagggcatctaccagacttccaacttccgcgtgcagcccaccgaaagcatcgtccgtttccctaacatcactaacctgtgccccttcgacgaggtcttcaacgccaccaccttcgcttctgtgtacgcctggaaccgcaagcgtatctctaactgcgtcgccgactactcagtgctgtacaacttcgctcccttcttcgccttcaagtgctacggagtgtcaccaactaagctgaacgacctgtgcttcaccaacgtctacgctgactctttcgtgatcaggggtaacgaggtctcacagatcgctccaggccagactggaaacatcgccgactacaactacaagctgcctgacgacttcaccggttgcgtcatcgcttggaactccaacaagctggacagcaaagtgggtggcaactacaactaccgttacaggctgttcagaaagtccaacctgaagcccttcgagcgtgacatcagcactgaaatctaccaggctggtaacaagccatgcaacggtgtcgccggcgtcaactgctacttccccctgcagtcctacggcttccgtccaacctacggtgtgggccaccagccttacagggtggtcgtgctgtccttcgaactcctccacgctccagctactgtgtgcggaccaaagaagagcaccaacctggtcaagaacaagtgcgtgaacttcaacttcaacggtctgaccggaactggtgtcctgaccgagtctaacaagaagttcctgcccttccagcagttcggtcgtgacatcgctgacactaccgacgccgtgagggacccccagaccctggaaatcctggacatcactccatgctctttcggaggtgtctcagtgatcactccaggaaccaacacttcaaaccaggtcgctgtgctgtaccagggtgtcaactgcaccgaagtccctgtggccatccacgctgaccagctgacccccacttggagagtgtacagcaccggctctaacgtcttccagactcgcgctggttgcctgatcggcgccgagtacgtgaactcctcttacgaatgcgacatccccatcggcgctggaatctgcgcctcataccagacccagactaagtcccaccagcaggctcagagcgtcgcctcacagtccatcatcgcttacaccatgtctctgggcgctgaaaactcagtggcctactcaaacaactccatcgccatccctaccaacttcactatctccgtgaccactgagatcctgcccgtctccatgaccaagactagcgtggactgcactatgtacatctgcggagactccaccgaatgcagcaacctgctgctgcagtacggtagcttctgcacccagctgaagcgtgctctgactggcatcgccgtggagcaggacaagaacactcaggaagtcttcgctcaggtgaagcaaatctacaagacccctcccatcaagtacttcggcggattcaacttctcccagatcctgcctgaccccagcaagccatctaagagatcattcatcgaggacctgctgttcaacaaggtcactctggccgacgctggtttcatcaagcagtacggagactgcctgggtgacatcgccgctcgcgacctgatctgcgctcagaagttcaacggcctgaccgtgctgccacctctgctgactgacgaaatgatcgcccagtacacttccgccctgctggctggaaccatcacttctggttggaccttcggtgctggtgctgctctgcagatccctttcgctatgcagatggcctacaggttcaacggaatcggtgtcacccagaacgtgctgtacgagaaccagaagctgatcgctaaccagttcaactccgccatcggcaagatccaggactccctgagctctactgccagcgctctgggaaagctgcaggacgtcgtgaaccacaacgcccaggctctgaacaccctggtcaagcagctgtcatccaagttcggagctatcagctctgtgctgaacgacatcctctcccgcctggaccctcctgaggctgaagtccagatcgacaggctgatcactggtagactgcagtctctgcagacctacgtgactcagcagctgatccgcgccgctgaaatccgtgcctcagctaacctggccgctaccaagatgtctgagtgcgtcctgggccagagcaagagggtggacttctgcggcaagggataccacctgatgtctttccctcagtcagctccccacggagtcgtgttcctgcacgtcacctacgtgccagcccaggagaagaacttcaccactgcccctgctatctgccacgacggcaaggctcacttcccccgtgaaggagtcttcgtgtccaacggcacccactggttcgtcactcagaggaacttctacgagccacagatcatcaccactgacaacactttcgtgagcggcaactgcgacgtggtcatcggtatcgtcaacaacaccgtgtacgaccccctgcagccagagctggactccttcaaggaagagctggacaagtacttcaagaaccacaccagcccagacgtcgacctgggcgacatctctggaatcaacgcttcagtcgtgaacatccagaaggagatcgaccgtctgaacgaagtggccaagaacctgaacgaatctctgatcgacctgcaggagctgggaaagtacgaacagtacatcaagtggccttggtacatctggctgggtttcatcgctggcctcatcgctatcgtgatggtgaccatcatgctgtgctgcatgacttcctgctgcagctgcctgaagggctgctgctcttgcggatcatgctgcaagttcgacgaggacgactcagaacccgtcctgaagggcgtgaagctgcactacacctaa

SEQ ID NO: 205 - protein, 1270 aa, synthetic construct
MFVFLVLLPLVSSQCVNLITRTQSYTNSFTRGVYYPDKVFRSSVLHSTQDLFLPFFSNVTWFHAIHVSGTNGTKRFDNPVLPFNDGVYFASTEKSNIIRGWIFGTTLDSKTQSLLIVNNATNVVIKVCEFQFCNDPFLDVYYHENNKSRMESELRVYSSANNCTFEYVSQPFLMDLEGKQGNFKNLREFVFKNIDGYFKIYSKHTPVNLGRDLPQGFSALEPLVDLPIGINITRFQTLLALHRSYLTPGDSSSSWTAGAAAYYVGYLQPRTFLLKYNENGTITDAVDCALDPLSETKCTLKSFTVEKGIYQTSNFRVQPTESIVRFPNITNLCPFHEVFNATRFASVYAWNRKRISNCVADYSVLYNFAPFFAFKCYGVSPTKLNDLCFTNVYADSFVIRGNEVSQIAPGQTGNIADYNYKLPDDFTGCVIAWNSNKLDSKVSGNYNYLYRLFRKSKLKPFERDISTEIYQAGNKPCNGVAGFNCYFPLQSYGFRPTYGVGHQPYRVVVLSFELLHAPATVCGPKKSTNLVKNKCVNFNFNGLTGTGVLTESNKKFLPFQQFGRDIADTTDAVRDPQTLEILDITPCSFGGVSVITPGTNTSNQVAVLYQGVNCTEVPVAIHADQLTPTWRVYSTGSNVFQTRAGCLIGAEYVNNSYECDIPIGAGICASYQTQTKSHQQAQSVASQSIIAYTMSLGAENSVAYSNNSIAIPTNFTISVTTEILPVSMTKTSVDCTMYICGDSTECSNLLLQYGSFCTQLKRALTGIAVEQDKNTQEVFAQVKQIYKTPPIKYFGGFNFSQILPDPSKPSKRSFIEDLLFNKVTLADAGFIKQYGDCLGDIAARDLICAQKFNGLTVLPPLLTDEMIAQYTSALLAGTITSGWTFGAGAALQIPFAMQMAYRFNGIGVTQNVLYENQKLIANQFNSAIGKIQDSLSSTASALGKLQDVVNHNAQALNTLVKQLSSKFGAISSVLNDILSRLDPPEAEVQIDRLITGRLQSLQTYVTQQLIRAAEIRASANLAATKMSECVLGQSKRVDFCGKGYHLMSFPQSAPHGVVFLHVTYVPAQEKNFTTAPAICHDGKAHFPREGVFVSNGTHWFVTQRNFYEPQIITTDNTFVSGNCDVVIGIVNNTVYDPLQPELDSFKEELDKYFKNHTSPDVDLGDISGINASVVNIQKEIDRLNEVAKNLNESLIDLQELGKYEQYIKWPWYIWLGFIAGLIAIVMVTIMLCCMTSCCSCLKGCCSCGSCCKFDEDDSEPVLKGVKLHYT

SEQ ID NO: 206 - DNA, 3813 bp, synthetic construct
  source 1..3813: mol_type = other DNA
atgttcgtcttcctggtgctgctgcctctggtctccagccagtgcgtgaacctgatcaccaggactcagtcctacaccaacagcttcactagaggtgtgtactaccctgacaaggtcttccgctcttcagtgctgcactctactcaggacctgttcctgcccttcttctcaaacgtcacctggttccacgccatccacgtgtccggcaccaacggcactaagagattcgacaacccagtgctgcctttcaacgacggcgtctacttcgcttctaccgagaagtcaaacatcatccgcggatggatcttcggcaccactctggactccaagactcagagcctgctgatcgtcaacaacgccaccaacgtggtcatcaaggtgtgcgaattccagttctgcaacgacccattcctggacgtgtactaccacgagaacaacaagtctcgcatggagtcagaattgagagtctactccagcgctaacaactgcactttcgagtacgtgtctcagcctttcctgatggacctggaaggaaagcagggtaacttcaagaacctgcgtgagttcgtcttcaagaacatcgacggttacttcaagatttactctaagcacaccccagtgaacctgggtagggacctgcctcagggcttctcagctctggagccactggtggacctgcctatcggcatcaacatcaccaggttccagactctgctggctctgcacagaagctacctgactccaggagactcatcttctagctggactgctggagctgctgcttactacgtgggttacctgcagcctcgcaccttcctgctgaagtacaacgaaaacggcaccatcactgacgccgtcgactgcgctctggaccctctgtctgaaaccaagtgcactctgaagtcattcaccgtggagaagggcatctaccagacttccaacttccgcgtgcagcccaccgaaagcatcgtccgtttccctaacatcactaacctgtgccccttccacgaggtcttcaacgccacccgtttcgcttctgtgtacgcctggaaccgcaagcgtatctctaactgcgtcgccgactactcagtgctgtacaacttcgctcccttcttcgccttcaagtgctacggagtgtcaccaactaagctgaacgacctgtgcttcaccaacgtctacgctgactctttcgtgatcaggggtaacgaggtctcacagatcgctccaggccagactggaaacatcgccgactacaactacaagctgcctgacgacttcaccggttgcgtcatcgcttggaactccaacaagctggacagcaaagtgagcggcaactacaactacttgtacaggctgttcagaaagtccaaactgaagcccttcgagcgtgacatcagcactgaaatctaccaggctggtaacaagccatgcaacggtgtcgccggctttaactgctacttccccctgcagtcctacggcttccgtccaacctacggtgtgggccaccagccttacagggtggtcgtgctgtccttcgaactcctccacgctccagctactgtgtgcggaccaaagaagagcaccaacctggtcaagaacaagtgcgtgaacttcaacttcaacggtctgaccggaactggtgtcctgaccgagtctaacaagaagttcctgcccttccagcagttcggtcgtgacatcgctgacactaccgacgccgtgagggacccccagaccctggaaatcctggacatcactccatgctctttcggaggtgtctcagtgatcactccaggaaccaacacttcaaaccaggtcgctgtgctgtaccagggtgtcaactgcaccgaagtccctgtggccatccacgctgaccagctgacccccacttggagagtgtacagcaccggctctaacgtcttccagactcgcgctggttgcctgatcggcgccgagtacgtgaacaactcttacgaatgcgacatccccatcggcgctggaatctgcgcctcataccagacccagactaagtcccaccagcaggctcagagcgtcgcctcacagtccatcatcgcttacaccatgtctctgggcgctgaaaactcagtggcctactcaaacaactccatcgccatccctaccaacttcactatctccgtgaccactgagatcctgcccgtctccatgaccaagactagcgtggactgcactatgtacatctgcggagactccaccgaatgcagcaacctgctgctgcagtacggtagcttctgcacccagctgaagcgtgctctgactggcatcgccgtggagcaggacaagaacactcaggaagtcttcgctcaggtgaagcaaatctacaagacccctcccatcaagtacttcggcggattcaacttctcccagatcctgcctgaccccagcaagccatctaagagatcattcatcgaggacctgctgttcaacaaggtcactctggccgacgctggtttcatcaagcagtacggagactgcctgggtgacatcgccgctcgcgacctgatctgcgctcagaagttcaacggcctgaccgtgctgccacctctgctgactgacgaaatgatcgcccagtacacttccgccctgctggctggaaccatcacttctggttggaccttcggtgctggtgctgctctgcagatccctttcgctatgcagatggcctacaggttcaacggaatcggtgtcacccagaacgtgctgtacgagaaccagaagctgatcgctaaccagttcaactccgccatcggcaagatccaggactccctgagctctactgccagcgctctgggaaagctgcaggacgtcgtgaaccacaacgcccaggctctgaacaccctggtcaagcagctgtcatccaagttcggagctatcagctctgtgctgaacgacatcctctcccgcctggaccctcctgaggctgaagtccagatcgacaggctgatcactggtagactgcagtctctgcagacctacgtgactcagcagctgatccgcgccgctgaaatccgtgcctcagctaacctggccgctaccaagatgtctgagtgcgtcctgggccagagcaagagggtggacttctgcggcaagggataccacctgatgtctttccctcagtcagctccccacggagtcgtgttcctgcacgtcacctacgtgccagcccaggagaagaacttcaccactgcccctgctatctgccacgacggcaaggctcacttcccccgtgaaggagtcttcgtgtccaacggcacccactggttcgtcactcagaggaacttctacgagccacagatcatcaccactgacaacactttcgtgagcggcaactgcgacgtggtcatcggtatcgtcaacaacaccgtgtacgaccccctgcagccagagctggactccttcaaggaagagctggacaagtacttcaagaaccacaccagcccagacgtcgacctgggcgacatctctggaatcaacgcttcagtcgtgaacatccagaaggagatcgaccgtctgaacgaagtggccaagaacctgaacgaatctctgatcgacctgcaggagctgggaaagtacgaacagtacatcaagtggccttggtacatctggctgggtttcatcgctggcctcatcgctatcgtgatggtgaccatcatgctgtgctgcatgacttcctgctgcagctgcctgaagggctgctgctcttgcggatcatgctgcaagttcgacgaggacgactcagaacccgtcctgaagggcgtgaagctgcactacacctaa

SEQ ID NO: 207 - protein, 1270 aa, synthetic construct; identical to SEQ ID NO: 160

SEQ ID NO: 208 - DNA, 3810 bp, synthetic construct
  source 1..3810: mol_type = other DNA
atgttcgtcttcctggtgctgctgcccctggtgtccagccagtgcgtgaacctgaccactaggactcagctgcctcccgcttacaccaactcattcactcgcggtgtgtactaccctgacaaggtcttccgttcttcagtgctgcactcaactcaggacctgttcctgcccttcttctccaacgtcacctggttccacgtcatctccggcaccaacggcactaagcgcttcgacaacccagtgctgcctttcaacgacggtgtctacttcgcttcaattgagaagtccaacatcatccgtggatggatcttcggcaccactctggacagcaagactcagtctctgctgatcgtcaacaacgccaccaacgtggtcatcaaggtctgcgaattccagttctgcaacgacccattcctggaccacaagaacaacaagtcatggatggagtccgaattccgcgtctactccagcgctaacaactgcactttcgagtacgtgtcccagcctttcctgatggacctggaaggaaagcagggtaacttcaagaacctgagggagttcgtgttcaagaacatcgacggatacttcaagatttacagcaagcacaccccaatcattgtgcgcgagccggaggacctgcctcagggtttctctgctctggagccactggtggacctgcctatcggcatcaacatcacccgcttccagactctgctggctctgcaccgttcctacctgactccaggcgactcatcttctggatggactgctggagctgctgcttactacgtgggctacctgcagcctcgcaccttcctgctgaagtacaacgaaaacggaaccatcactgacgccgtcgactgcgctctggaccctctgtcagaaaccaagtgcactctgaagtccttcaccgtggagaagggcatctaccagacttcaaacttcagggtgcagcccaccgaatccatcgtcagattccctaacatcactaacctgtgccccttcgacgaggtcttcaacgccacccgcttcgcttccgtgtacgcctggaacaggaagagaatctcaaactgcgtcgctgactactccgtgctgtacaaccttgccccgttctttaccttcaagtgctacggcgtgtcaccaactaagctgaacgacctgtgcttcaccaacgtctacgccgactccttcgtgatcaggggagacgaggtcagacagatcgctcctggccagactggaaatatcgccgactacaactacaagctgcccgacgacttcaccggttgcgtcatcgcttggaacagcaacaaactggactctaaagtgagtggcaactacaactacctgtaccgcctgttccgtaagtcaaacctgaagccattcgagagggacatcagcactgaaatctaccaggccggaaataaaccttgcaacggtgtcgcgggcttcaactgctacttccccctgaggtcctactctttccgaccaacttatggtgtgggccaccagccttacagagtggtcgtgctgagcttcgaactgctccacgctcctgctactgtgtgcggtccaaagaagtctaccaacctggtcaagaacaagtgcgtgaacttcaacttcaacggcctgaaaggaactggtgtcctgaccgagagcaacaagaagttcctgcccttccagcagttcggaagggacatcgctgacaccactgacgctgtgcgcgaccctcagaccctggaaatcctggacatcactccatgctcattcggaggtgtctccgtgatcacccctggcaccaacacttctaaccaggtcgctgtgctgtaccagggcgtcaactgcaccgaggtccctgtggccatccacgctgaccagctgacccccacttggcgcgtgtactccaccggcagcaacgtgttccagactcgtgctggttgcctgatcggcgccgagtacgtgaacaacagctacgaatgcgacatccccatcggcgctggaatctgcgcctcttaccagacccagactaagagccaccagcaggctcagtctgtggcctctcagtcaatcatcgcttacaccatgtcactgggcgctgaaaactccgtggcctactctaacaactcaatcgccatccccaccaacttcactatcagcgtgaccactgagatcctgccagtcagcatgaccaagacttctgtggactgcactatgtacatctgcggagacagcaccgaatgctctaacctgctgctgcagtacggctctttctgcacccagctgaagcgtgctctgactggaatcgccgtggagcaggacaagaacactcaggaagtcttcgctcaggtgaagcaaatctacaagaccccacctatcaagtacttcggcggattcaacttctcccagatcctgcctgacccctccaagccaagcaagcgctctttcatcgaggacctgctgttcaacaaggtcactctggccgacgctggattcatcaagcagtacggagactgcctgggtgacatcgccgctcgtgacctgatctgcgctcagaagttcaagggtctgaccgtgctgcccccactgctgactgacgaaatgatcgcccagtacactagcgccctgctggctggaaccatcacttctggttggaccttcggtgctggcgccgctctgcagatccctttcgctatgcagatggcctaccgtttcaacggaatcggtgtcacccagaacgtgctgtacgagaaccagaagctgatcgctaaccagttcaactcagccatcggaaagatccaggacagcctgagctctactgcctctgctctgggcaagctgcaggacgtcgtgaaccataacgcccaggctctgaacaccctggtcaagcagctgtcatccaagttcggtgctatcagctctgtgctgaacgacatcttctcccgcctggaccctcccgaggccgaagtgcagatcgaccgcctgatcactggccgtctgcagtcactgcagacctacgtgactcagcagctgatcagggccgctgaaatcagagcctccgctaacctggccgctaccaagatgagcgagtgcgtcctgggtcaatctaagcgtgtggacttctgcggcaagggataccacctgatgtcattccctcagtctgctccccacggtgtggtgttcctgcacgtcacctacgtgccagcccaggagaagaacttcaccactgcccctgctatctgccacgacggcaaggctcacttccccagggaaggtgtcttcgtgagcaacggcacccactggttcgtcactcagagaaacttctacgagccacagatcatcaccactgacaacactttcgtgtctggaaactgcgacgtggtcatcggtatcgtcaacaacaccgtgtacgaccccctgcagccagagctggactcattcaaggaggaactggacaagtacttcaagaaccacacctcccctgacgtcgacctgggcgacatctcaggaatcaacgcttccgtcgtgaacatccagaaggagatcgaccgcctgaacgaagtggccaagaacctgaacgaaagcctgatcgacctgcaggagctgggcaagtacgaacagtacatcaagtggccttggtacatctggctgggtttcatcgctggcctcatcgctatcgtgatggtgaccatcatgctgtgctgcatgacttcatgctgctcctgcctgaagggctgctgcagctgcggatcttgctgcaagttcgacgaggacgactctgaacccgtcctgaagggcgtgaagctgcactacacc

SEQ ID NO: 209 - protein, 1270 aa, synthetic construct
MFVFLVLLPLVSSQCVNLITRTQSYTNSFTRGVYYPDKVFRSSVLHSTQDLFLPFFSNVTWFHAIHVSGTNGTKRFDNPVLPFNDGVYFASTEKSNIIRGWIFGTTLDSKTQSLLIVNNATNVVIKVCEFQFCNDPFLDVYYHENNKSRMESELRVYSSANNCTFEYVSQPFLMDLEGKQGNFKNLREFVFKNIDGYFKIYSKHTPVNLGRDLPQGFSALEPLVDLPIGINITRFQTLLALHRSYLTPGDSSSSWTAGAAAYYVGYLQPRTFLLKYNENGTITDAVDCALDPLSETKCTLKSFTVEKGIYQTSNFRVQPTESIVRFPNITNLCPFHEVFNATTFASVYAWNRKRISNCVADYSVLYNFAPFFAFKCYGVSPTKLNDLCFTNVYADSFVIRGNEVSQIAPGQTGNIADYNYKLPDDFTGCVIAWNSNKLDSKVSGNYNYRYRLFRKSKLKPFERDISTEIYQAGNKPCNGVAGSNCYFPLQSYGFRPTYGVGHQPYRVVVLSFELLHAPATVCGPKKSTNLVKNKCVNFNFNGLTGTGVLTESNKKFLPFQQFGRDIADTTDAVRDPQTLEILDITPCSFGGVSVITPGTNISNQVAVLYQGVNCTEVPVAIHADQLTPTWRVYSTGSNVFQTRAGCLIGAEYVNNSYECDIPIGAGICASYQTQTKSHQQAQSVASQSIIAYTMSLGAENSVAYSNNSIAIPTNFTISVTTEILPVSMTKTSVDCTMYICGDSTECSNLLLQYGSFCTQLKRALTGIAVEQDKNTQEVFAQVKQIYKTPPIKYFGGFNFSQILPDPSKPSKRSFIEDLLFNKVTLADAGFIKQYGDCLGDIAARDLICAQKFNGLTVLPPLLTDEMIAQYTSALLAGTITSGWTFGAGAALQIPFAMQMAYRFNGIGVTQNVLYENQKLIANQFNSAIGKIQDSLSSTASALGKLQDVVNHNAQALNTLVKQLSSKFGAISSVLNDILSRLDPPEAEVQIDRLITGRLQSLQTYVTQQLIRAAEIRASANLAATKMSECVLGQSKRVDFCGKGYHLMSFPQSAPHGVVFLHVTYVPAQEKNFTTAPAICHDGKAHFPREGVFVSNGTHWFVTQRNFYEPQIITTDNTFVSGNCDVVIGIVNNTVYDPLQPELDSFKEELDKYFKNHTSPDVDLGDISGINASVVNIQKEIDRLNEVAKNLNESLINLQELGKYEQYIKWPWYIWLGFIAGLIAIVMVTIMLCCMTSCCSCLKGCCSCGSCCKFDEDDSEPVLKGVKLHYT

SEQ ID NO: 210 - DNA, 3813 bp, synthetic construct
  source 1..3813: mol_type = other DNA
atgttcgtcttcctggtgctgctgcctctggtctccagccagtgcgtgaacctgatcaccaggactcagtcctacaccaacagcttcactagaggtgtgtactaccctgacaaggtcttccgctcttcagtgctgcactctactcaggacctgttcctgcccttcttctcaaacgtcacctggttccacgccatccacgtgtccggcaccaacggcactaagagattcgacaacccagtgctgcctttcaacgacggcgtctacttcgcttctaccgagaagtcaaacatcatccgcggatggatcttcggcaccactctggactccaagactcagagcctgctgatcgtcaacaacgccaccaacgtggtcatcaaggtgtgcgaattccagttctgcaacgacccattcctggacgtgtactaccacgagaacaacaagtctcgcatggagtcagaattgagagtctactccagcgctaacaactgcactttcgagtacgtgtctcagcctttcctgatggacctggaaggaaagcagggtaacttcaagaacctgcgtgagttcgtcttcaagaacatcgacggttacttcaagatttactctaagcacaccccagtgaacctgggtagggacctgcctcagggcttctcagctctggagccactggtggacctgcctatcggcatcaacatcaccaggttccagactctgctggctctgcacagaagctacctgactccaggagactcatcttctagctggactgctggagctgctgcttactacgtgggttacctgcagcctcgcaccttcctgctgaagtacaacgaaaacggcaccatcactgacgccgtcgactgcgctctggaccctctgtctgaaaccaagtgcactctgaagtcattcaccgtggagaagggcatctaccagacttccaacttccgcgtgcagcccaccgaaagcatcgtccgtttccctaacatcactaacctgtgccccttccacgaggtcttcaacgccaccaccttcgcttctgtgtacgcctggaaccgcaagcgtatctctaactgcgtcgccgactactcagtgctgtacaacttcgctcccttcttcgccttcaagtgctacggagtgtcaccaactaagctgaacgacctgtgcttcaccaacgtctacgctgactctttcgtgatcaggggtaacgaggtctcacagatcgctccaggccagactggaaacatcgccgactacaactacaagctgcctgacgacttcaccggttgcgtcatcgcttggaactccaacaagctggacagcaaagtgagcggcaactacaactaccgttacaggctgttcagaaagtccaaactgaagcccttcgagcgtgacatcagcactgaaatctaccaggctggtaacaagccatgcaacggtgtcgccggctccaactgctacttccccctgcagtcctacggcttccgtccaacctacggtgtgggccaccagccttacagggtggtcgtgctgtccttcgaactcctccacgctccagctactgtgtgcggaccaaagaagagcaccaacctggtcaagaacaagtgcgtgaacttcaacttcaacggtctgaccggaactggtgtcctgaccgagtctaacaagaagttcctgcccttccagcagttcggtcgtgacatcgctgacactaccgacgccgtgagggacccccagaccctggaaatcctggacatcactccatgctctttcggaggtgtctcagtgatcactccaggaaccaacatctcaaaccaggtcgctgtgctgtaccagggtgtcaactgcaccgaagtccctgtggccatccacgctgaccagctgacccccacttggagagtgtacagcaccggctctaacgtcttccagactcgcgctggttgcctgatcggcgccgagtacgtgaacaactcttacgaatgcgacatccccatcggcgctggaatctgcgcctcataccagacccagactaagtcccaccagcaggctcagagcgtcgcctcacagtccatcatcgcttacaccatgtctctgggcgctgaaaactcagtggcctactcaaacaactccatcgccatccctaccaacttcactatctccgtgaccactgagatcctgcccgtctccatgaccaagactagcgtggactgcactatgtacatctgcggagactccaccgaatgcagcaacctgctgctgcagtacggtagcttctgcacccagctgaagcgtgctctgactggcatcgccgtggagcaggacaagaacactcaggaagtcttcgctcaggtgaagcaaatctacaagacccctcccatcaagtacttcggcggattcaacttctcccagatcctgcctgaccccagcaagccatctaagagatcattcatcgaggacctgctgttcaacaaggtcactctggccgacgctggtttcatcaagcagtacggagactgcctgggtgacatcgccgctcgcgacctgatctgcgctcagaagttcaacggcctgaccgtgctgccacctctgctgactgacgaaatgatcgcccagtacacttccgccctgctggctggaaccatcacttctggttggaccttcggtgctggtgctgctctgcagatccctttcgctatgcagatggcctacaggttcaacggaatcggtgtcacccagaacgtgctgtacgagaaccagaagctgatcgctaaccagttcaactccgccatcggcaagatccaggactccctgagctctactgccagcgctctgggaaagctgcaggacgtcgtgaaccacaacgcccaggctctgaacaccctggtcaagcagctgtcatccaagttcggagctatcagctctgtgctgaacgacatcctctcccgcctggaccctcctgaggctgaagtccagatcgacaggctgatcactggtagactgcagtctctgcagacctacgtgactcagcagctgatccgcgccgctgaaatccgtgcctcagctaacctggccgctaccaagatgtctgagtgcgtcctgggccagagcaagagggtggacttctgcggcaagggataccacctgatgtctttccctcagtcagctccccacggagtcgtgttcctgcacgtcacctacgtgccagcccaggagaagaacttcaccactgcccctgctatctgccacgacggcaaggctcacttcccccgtgaaggagtcttcgtgtccaacggcacccactggttcgtcactcagaggaacttctacgagccacagatcatcaccactgacaacactttcgtgagcggcaactgcgacgtggtcatcggtatcgtcaacaacaccgtgtacgaccccctgcagccagagctggactccttcaaggaagagctggacaagtacttcaagaaccacaccagcccagacgtcgacctgggcgacatctctggaatcaacgcttcagtcgtgaacatccagaaggagatcgaccgtctgaacgaagtggccaagaacctgaacgaatctctgatcaacctgcaggagctgggaaagtacgaacagtacatcaagtggccttggtacatctggctgggtttcatcgctggcctcatcgctatcgtgatggtgaccatcatgctgtgctgcatgacttcctgctgcagctgcctgaagggctgctgctcttgcggatcatgctgcaagttcgacgaggacgactcagaacccgtcctgaagggcgtgaagctgcactacacctaa

SEQ ID NO: 211 - protein, 1268 aa, synthetic construct
MFVFLVLLPLVSSQCVNLITRTQSYTNSFTRGVYYPDKVFRSSVLHSTQDLFLPFFSNVTWFHAISGTNGTKRFDNPVLPFNDGVYFASTEKSNIIRGWIFGTTLDSKTQSLLIVNNATNVVIKVCEFQFCNDPFLDVYYHKNNKSWMESEFRVYSSANNCTFEYVSQPFLMDLEGKQGNFKNLREFVFKNIDGYFKIYSKHTPINLGRDLPQGFSALEPLVDLPIGINITRFQTLLALHRSYLTPGDSSSGWTAGAAAYYVGYLQPRTFLLKYNENGTITDAVDCALDPLSETKCTLKSFTVEKGIYQTSNFRVQPTESIVRFPNITNLCPFDEVFNATTFASVYAWNRKRISNCVADYSVLYNFAPFFAFKCYGVSPTKLNDLCFTNVYADSFVIRGNEVSQIAPGQTGNIADYNYKLPDDFTGCVIAWNSNKLDSKVGGNYNYRYRLFRKSNLKPFERDISTEIYQAGNKPCNGVAGVNCYFPLQSYGFRPTYGVGHQPYRVVVLSFELLHAPATVCGPKKSTNLVKNKCVNFNFNGLTGTGVLTESNKKFLPFQQFGRDIADTTDAVRDPQTLEILDITPCSFGGVSVITPGTNTSNQVAVLYQGVNCTEVPVAIHADQLTPTWRVYSTGSNVFQTRAGCLIGAEYVNNSYECDIPIGAGICASYQTQTKSHQQAQSVASQSIIAYTMSLGAENSVAYSNNSIAIPTNFTISVTTEILPVSMTKTSVDCTMYICGDSTECSNLLLQYGSFCTQLKRALTGIAVEQDKNTQEVFAQVKQIYKTPPIKYFGGFNFSQILPDPSKPSKRSFIEDLLFNKVTLADAGFIKQYGDCLGDIAARDLICAQKFNGLTVLPPLLTDEMIAQYTSALLAGTITSGWTFGAGAALQIPFAMQMAYRFNGIGVTQNVLYENQKLIANQFNSAIGKIQDSLSSTASALGKLQDVVNHNAQALNTLVKQLSSKFGAISSVLNDILSRLDPPEAEVQIDRLITGRLQSLQTYVTQQLIRAAEIRASANLAATKMSECVLGQSKRVDFCGKGYHLMSFPQSAPHGVVFLHVTYVPAQEKNFTTAPAICHDGKAHFPREGVFVSNGTHWFVTQRNFYEPQIITTDNTFVSGNCDVVIGIVNNTVYDPLQPELDSFKEELDKYFKNHTSPDVDLGDISGINASVVNIQKEIDRLNEVAKNLNESLIDLQELGKYEQYIKWPWYIWLGFIAGLIAIVMVTIMLCCMTSCCSCLKGCCSCGSCCKFDEDDSEPVLKGVKLHYT

SEQ ID NO: 212 - DNA, 3807 bp, synthetic construct
  source 1..3807: mol_type = other DNA
atgttcgtcttcctggtgctgctgcctctggtctccagccagtgcgtgaacctgatcaccaggactcagtcctacaccaacagcttcactagaggtgtgtactaccctgacaaggtcttccgctcttcagtgctgcactctactcaggacctgttcctgcccttcttctcaaacgtcacctggttccacgccatctccggcaccaacggcactaagagattcgacaacccagtgctgcctttcaacgacggcgtctacttcgcttctaccgagaagtcaaacatcatccgcggatggatcttcggcaccactctggactccaagactcagagcctgctgatcgtcaacaacgccaccaacgtggtcatcaaggtgtgcgaattccagttctgcaacgacccattcctggacgtgtactaccacaagaacaacaagtcttggatggagtcagaattcagagtctactccagcgctaacaactgcactttcgagtacgtgtctcagcctttcctgatggacctggaaggaaagcagggtaacttcaagaacctgcgtgagttcgtcttcaagaacatcgacggttacttcaagatttactctaagcacaccccaatcaacctgggtagggacctgcctcagggcttctcagctctggagccactggtggacctgcctatcggcatcaacatcaccaggttccagactctgctggctctgcacagaagctacctgactccaggagactcatcttctggatggactgctggagctgctgcttactacgtgggttacctgcagcctcgcaccttcctgctgaagtacaacgaaaacggcaccatcactgacgccgtcgactgcgctctggaccctctgtctgaaaccaagtgcactctgaagtcattcaccgtggagaagggcatctaccagacttccaacttccgcgtgcagcccaccgaaagcatcgtccgtttccctaacatcactaacctgtgccccttcgacgaggtcttcaacgccaccaccttcgcttctgtgtacgcctggaaccgcaagcgtatctctaactgcgtcgccgactactcagtgctgtacaacttcgctcccttcttcgccttcaagtgctacggagtgtcaccaactaagctgaacgacctgtgcttcaccaacgtctacgctgactctttcgtgatcaggggtaacgaggtctcacagatcgctccaggccagactggaaacatcgccgactacaactacaagctgcctgacgacttcaccggttgcgtcatcgcttggaactccaacaagctggacagcaaagtgggtggcaactacaactaccgttacaggctgttcagaaagtccaacctgaagcccttcgagcgtgacatcagcactgaaatctaccaggctggtaacaagccatgcaacggtgtcgccggcgtcaactgctacttccccctgcagtcctacggcttccgtccaacctacggtgtgggccaccagccttacagggtggtcgtgctgtccttcgaactcctccacgctccagctactgtgtgcggaccaaagaagagcaccaacctggtcaagaacaagtgcgtgaacttcaacttcaacggtctgaccggaactggtgtcctgaccgagtctaacaagaagttcctgcccttccagcagttcggtcgtgacatcgctgacactaccgacgccgtgagggacccccagaccctggaaatcctggacatcactccatgctctttcggaggtgtctcagtgatcactccaggaaccaacacttcaaaccaggtcgctgtgctgtaccagggtgtcaactgcaccgaagtccctgtggccatccacgctgaccagctgacccccacttggagagtgtacagcaccggctctaacgtcttccagactcgcgctggttgcctgatcggcgccgagtacgtgaacaactcttacgaatgcgacatccccatcggcgctggaatctgcgcctcataccagacccagactaagtcccaccagcaggctcagagcgtcgcctcacagtccatcatcgcttacaccatgtctctgggcgctgaaaactcagtggcctactcaaacaactccatcgccatccctaccaacttcactatctccgtgaccactgagatcctgcccgtctccatgaccaagactagcgtggactgcactatgtacatctgcggagactccaccgaatgcagcaacctgctgctgcagtacggtagcttctgcacccagctgaagcgtgctctgactggcatcgccgtggagcaggacaagaacactcaggaagtcttcgctcaggtgaagcaaatctacaagacccctcccatcaagtacttcggcggattcaacttctcccagatcctgcctgaccccagcaagccatctaagagatcattcatcgaggacctgctgttcaacaaggtcactctggccgacgctggtttcatcaagcagtacggagactgcctgggtgacatcgccgctcgcgacctgatctgcgctcagaagttcaacggcctgaccgtgctgccacctctgctgactgacgaaatgatcgcccagtacacttccgccctgctggctggaaccatcacttctggttggaccttcggtgctggtgctgctctgcagatccctttcgctatgcagatggcctacaggttcaacggaatcggtgtcacccagaacgtgctgtacgagaaccagaagctgatcgctaaccagttcaactccgccatcggcaagatccaggactccctgagctctactgccagcgctctgggaaagctgcaggacgtcgtgaaccacaacgcccaggctctgaacaccctggtcaagcagctgtcatccaagttcggagctatcagctctgtgctgaacgacatcctctcccgcctggaccctcctgaggctgaagtccagatcgacaggctgatcactggtagactgcagtctctgcagacctacgtgactcagcagctgatccgcgccgctgaaatccgtgcctcagctaacctggccgctaccaagatgtctgagtgcgtcctgggccagagcaagagggtggacttctgcggcaagggataccacctgatgtctttccctcagtcagctccccacggagtcgtgttcctgcacgtcacctacgtgccagcccaggagaagaacttcaccactgcccctgctatctgccacgacggcaaggctcacttcccccgtgaaggagtcttcgtgtccaacggcacccactggttcgtcactcagaggaacttctacgagccacagatcatcaccactgacaacactttcgtgagcggcaactgcgacgtggtcatcggtatcgtcaacaacaccgtgtacgaccccctgcagccagagctggactccttcaaggaagagctggacaagtacttcaagaaccacaccagcccagacgtcgacctgggcgacatctctggaatcaacgcttcagtcgtgaacatccagaaggagatcgaccgtctgaacgaagtggccaagaacctgaacgaatctctgatcgacctgcaggagctgggaaagtacgaacagtacatcaagtggccttggtacatctggctgggtttcatcgctggcctcatcgctatcgtgatggtgaccatcatgctgtgctgcatgacttcctgctgcagctgcctgaagggctgctgctcttgcggatcatgctgcaagttcgacgaggacgactcagaacccgtcctgaagggcgtgaagctgcactacacctaa

SEQ ID NO: 213 - protein, 1268 aa, synthetic construct
MFVFLVLLPLVSSQCVNLITRTQSYTNSFTRGVYYPDKVFRSSVLHSTQDLFLPFFSNVTWFHAISGTNGTKRFDNPVLPFNDGVYFASTEKSNIIRGWIFGTTLDSKTQSLLIVNNATNVVIKVCEFQFCNDPFLDVYYHKNNKSWMESEFRVYSSANNCTFEYVSQPFLMDLEGKQGNFKNLREFVFKNIDGYFKIYSKHTPINLGRDLPQGFSALEPLVDLPIGINITRFQTLLALHRSYLTPGDSSSGWTAGAAAYYVGYLQPRTFLLKYNENGTITDAVDCALDPLSETKCTLKSFTVEKGIYQTSNFRVQPTESIVRFPNITNLCPFDEVFNATTFASVYAWNRKRISNCVADYSVLYNFAPFFAFKCYGVSPTKLNDLCFTNVYADSFVIRGNEVSQIAPGQTGNIADYNYKLPDDFTGCVIAWNSNKLDSTVGGNYNYRYRLFRKSKLKPFERDISTEIYQAGNKPCNGVAGVNCYFPLQSYGFRPTYGVGHQPYRVVVLSFELLHAPATVCGPKKSTNLVKNKCVNFNFNGLTGTGVLTESNKKFLPFQQFGRDIADTTDAVRDPQTLEILDITPCSFGGVSVITPGTNTSNQVAVLYQGVNCTEVPVAIHADQLTPTWRVYSTGSNVFQTRAGCLIGAEYVNNSYECDIPIGAGICASYQTQTKSHQQAQSVASQSIIAYTMSLGAENSVAYSNNSIAIPTNFTISVTTEILPVSMTKTSVDCTMYICGDSTECSNLLLQYGSFCTQLKRALTGIAVEQDKNTQEVFAQVKQIYKTPPIKYFGGFNFSQILPDPSKPSKRSFIEDLLFNKVTLADAGFIKQYGDCLGDIAARDLICAQKFNGLTVLPPLLTDEMIAQYTSALLAGTITSGWTFGAGAALQIPFAMQMAYRFNGIGVTQNVLYENQKLIANQFNSAIGKIQDSLSSTASALGKLQDVVNHNAQALNTLVKQLSSKFGAISSVLNDILSRLDPPEAEVQIDRLITGRLQSLQTYVTQQLIRAAEIRASANLAATKMSECVLGQSKRVDFCGKGYHLMSFPQSAPHGVVFLHVTYVPAQEKNFTTAPAICHDGKAHFPREGVFVSNGTHWFVTQRNFYEPQIITTDNTFVSGNCDVVIGIVNNTVYDPLQPELDSFKEELDKYFKNHTSPDVDLGDISGINASVVNIQKEIDRLNEVAKNLNESLIDLQELGKYEQYIKWPWYIWLGFIAGLIAIVMVTIMLCCMTSCCSCLKGCCSCGSCCKFDEDDSEPVLKGVKLHYT

SEQ ID NO: 214 - DNA, 3807 bp, synthetic construct
  source 1..3807: mol_type = other DNA
atgttcgtcttcctggtgctgctgcctctggtctccagccagtgcgtgaacctgatcaccaggactcagtcctacaccaacagcttcactagaggtgtgtactaccctgacaaggtcttccgctcttcagtgctgcactctactcaggacctgttcctgcccttcttctcaaacgtcacctggttccacgccatctccggcaccaacggcactaagagattcgacaacccagtgctgcctttcaacgacggcgtctacttcgcttctaccgagaagtcaaacatcatccgcggatggatcttcggcaccactctggactccaagactcagagcctgctgatcgtcaacaacgccaccaacgtggtcatcaaggtgtgcgaattccagttctgcaacgacccattcctggacgtgtactaccacaagaacaacaagtcttggatggagtcagaattcagagtctactccagcgctaacaactgcactttcgagtacgtgtctcagcctttcctgatggacctggaaggaaagcagggtaacttcaagaacctgcgtgagttcgtcttcaagaacatcgacggttacttcaagatttactctaagcacaccccaatcaacctgggtagggacctgcctcagggcttctcagctctggagccactggtggacctgcctatcggcatcaacatcaccaggttccagactctgctggctctgcacagaagctacctgactccaggagactcatcttctggatggactgctggagctgctgcttactacgtgggttacctgcagcctcgcaccttcctgctgaagtacaacgaaaacggcaccatcactgacgccgtcgactgcgctctggaccctctgtctgaaaccaagtgcactctgaagtcattcaccgtggagaagggcatctaccagacttccaacttccgcgtgcagcccaccgaaagcatcgtccgtttccctaacatcactaacctgtgccccttcgacgaggtcttcaacgccaccaccttcgcttctgtgtacgcctggaaccgcaagcgtatctctaactgcgtcgccgactactcagtgctgtacaacttcgctcccttcttcgccttcaagtgctacggagtgtcaccaactaagctgaacgacctgtgcttcaccaacgtctacgctgactctttcgtgatcaggggtaacgaggtctcacagatcgctccaggccagactggaaacatcgccgactacaactacaagctgcctgacgacttcaccggttgcgtcatcgcttggaactccaacaagctggacagcaccgtgggtggcaactacaactaccgttacaggctgttcagaaagtccaagctgaagcccttcgagcgtgacatcagcactgaaatctaccaggctggtaacaagccatgcaacggtgtcgccggcgtcaactgctacttccccctgcagtcctacggcttccgtccaacctacggtgtgggccaccagccttacagggtggtcgtgctgtccttcgaactcctccacgctccagctactgtgtgcggaccaaagaagagcaccaacctggtcaagaacaagtgcgtgaacttcaacttcaacggtctgaccggaactggtgtcctgaccgagtctaacaagaagttcctgcccttccagcagttcggtcgtgacatcgctgacactaccgacgccgtgagggacccccagaccctggaaatcctggacatcactccatgctctttcggaggtgtctcagtgatcactccaggaaccaacacttcaaaccaggtcgctgtgctgtaccagggtgtcaactgcaccgaagtccctgtggccatccacgctgaccagctgacccccacttggagagtgtacagcaccggctctaacgtcttccagactcgcgctggttgcctgatcggcgccgagtacgtgaacaactcttacgaatgcgacatccccatcggcgctggaatctgcgcctcataccagacccagactaagtcccaccagcaggctcagagcgtcgcctcacagtccatcatcgcttacaccatgtctctgggcgctgaaaactcagtggcctactcaaacaactccatcgccatccctaccaacttcactatctccgtgaccactgagatcctgcccgtctccatgaccaagactagcgtggactgcactatgtacatctgcggagactccaccgaatgcagcaacctgctgctgcagtacggtagcttctgcacccagctgaagcgtgctctgactggcatcgccgtggagcaggacaagaacactcaggaagtcttcgctcaggtgaagcaaatctacaagacccctcccatcaagtacttcggcggattcaacttctcccagatcctgcctgaccccagcaagccatctaagagatcattcatcgaggacctgctgttcaacaaggtcactctggccgacgctggtttcatcaagcagtacggagactgcctgggtgacatcgccgctcgcgacctgatctgcgctcagaagttcaacggcctgaccgtgctgccacctctgctgactgacgaaatgatcgcccagtacacttccgccctgctggctggaaccatcacttctggttggaccttcggtgctggtgctgctctgcagatccctttcgctatgcagatggcctacaggttcaacggaatcggtgtcacccagaacgtgctgtacgagaaccagaagctgatcgctaaccagttcaactccgccatcggcaagatccaggactccctgagctctactgccagcgctctgggaaagctgcaggacgtcgtgaaccacaacgcccaggctctgaacaccctggtcaagcagctgtcatccaagttcggagctatcagctctgtgctgaacgacatcctctcccgcctggaccctcctgaggctgaagtccagatcgacaggctgatcactggtagactgcagtctctgcagacctacgtgactcagcagctgatccgcgccgctgaaatccgtgcctcagctaacctggccgctaccaagatgtctgagtgcgtcctgggccagagcaagagggtggacttctgcggcaagggataccacctgatgtctttccctcagtcagctccccacggagtcgtgttcctgcacgtcacctacgtgccagcccaggagaagaacttcaccactgcccctgctatctgccacgacggcaaggctcacttcccccgtgaaggagtcttcgtgtccaacggcacccactggttcgtcactcagaggaacttctacgagccacagatcatcaccactgacaacactttcgtgagcggcaactgcgacgtggtcatcggtatcgtcaacaacaccgtgtacgaccccctgcagccagagctggactccttcaaggaagagctggacaagtacttcaagaaccacaccagcccagacgtcgacctgggcgacatctctggaatcaacgcttcagtcgtgaacatccagaaggagatcgaccgtctgaacgaagtggccaagaacctgaacgaatctctgatcgacctgcaggagctgggaaagtacgaacagtacatcaagtggccttggtacatctggctgggtttcatcgctggcctcatcgctatcgtgatggtgaccatcatgctgtgctgcatgacttcctgctgcagctgcctgaagggctgctgctcttgcggatcatgctgcaagttcgacgaggacgactcagaacccgtcctgaagggcgtgaagctgcactacacctaa

SEQ ID NO: 215 - protein, 1268 aa, synthetic construct
MFVFLVLLPLVSSQCVNLITRTQSYTNSFTRGVYYPDKVFRSSVLHSTQDLFLPFFSNVTWFHAISGTNGTKRFDNPVLPFNDGVYFASTEKSNIIRGWIFGTTLDSKTQSLLIVNNATNVVIKVCEFQFCNDPFLDVYYHKNNKSWMESEFRVYSSANNCTFEYVSQPFLMDLEGKQGNFKNLREFVFKNIDGYFKIYSKHTPINLGRDLPQGFSALEPLVDLPIGINITRFQTLLALHRSYLTPGDSSSGWTAGAAAYYVGYLQPRTFLLKYNENGTITDAVDCALDPLSETKCTLKSFTVEKGIYQTSNFRVQPTESIVRFPNITNLCPFDEVFNATRFASVYAWNRKRISNCVADYSVLYNFAPFFAFKCYGVSPTKLNDLCFTNVYADSFVIRGNEVSQIAPGQTGNIADYNYKLPDDFTGCVIAWNSNKLDSTVGGNYNYRYRLFRKSKLKPFERDISTEIYQAGNKPCNGVAGVNCYFPLQSYGFRPTYGVGHQPYRVVVLSFELLHAPATVCGPKKSTNLVKNKCVNFNFNGLTGTGVLTESNKKFLPFQQFGRDIADTTDAVRDPQTLEILDITPCSFGGVSVITPGTNTSNQVAVLYQGVNCTEVPVAIHADQLTPTWRVYSTGSNVFQTRAGCLIGAEYVNNSYECDIPIGAGICASYQTQTKSHQQAQSVASQSIIAYTMSLGAENSVAYSNNSIAIPTNFTISVTTEILPVSMTKTSVDCTMYICGDSTECSNLLLQYGSFCTQLKRALTGIAVEQDKNTQEVFAQVKQIYKTPPIKYFGGFNFSQILPDPSKPSKRSFIEDLLFNKVTLADAGFIKQYGDCLGDIAARDLICAQKFNGLTVLPPLLTDEMIAQYTSALLAGTITSGWTFGAGAALQIPFAMQMAYRFNGIGVTQNVLYENQKLIANQFNSAIGKIQDSLSSTASALGKLQDVVNHNAQALNTLVKQLSSKFGAISSVLNDILSRLDPPEAEVQIDRLITGRLQSLQTYVTQQLIRAAEIRASANLAATKMSECVLGQSKRVDFCGKGYHLMSFPQSAPHGVVFLHVTYVPAQEKNFTTAPAICHDGKAHFPREGVFVSNGTHWFVTQRNFYEPQIITTDNTFVSGNCDVVIGIVNNTVYDPLQPELDSFKEELDKYFKNHTSPDVDLGDISGINASVVNIQKEIDRLNEVAKNLNESLIDLQELGKYEQYIKWPWYIWLGFIAGLIAIVMVTIMLCCMTSCCSCLKGCCSCGSCCKFDEDDSEPVLKGVKLHYT

SEQ ID NO: 216 - DNA, 3807 bp, synthetic construct
  source 1..3807: mol_type = other DNA
atgttcgtcttcctggtgctgctgcctctggtctccagccagtgcgtgaacctgatcaccaggactcagtcctacaccaacagcttcactagaggtgtgtactaccctgacaaggtcttccgctcttcagtgctgcactctactcaggacctgttcctgcccttcttctcaaacgtcacctggttccacgccatctccggcaccaacggcactaagagattcgacaacccagtgctgcctttcaacgacggcgtctacttcgcttctaccgagaagtcaaacatcatccgcggatggatcttcggcaccactctggactccaagactcagagcctgctgatcgtcaacaacgccaccaacgtggtcatcaaggtgtgcgaattccagttctgcaacgacccattcctggacgtgtactaccacaagaacaacaagtcttggatggagtcagaattcagagtctactccagcgctaacaactgcactttcgagtacgtgtctcagcctttcctgatggacctggaaggaaagcagggtaacttcaagaacctgcgtgagttcgtcttcaagaacatcgacggttacttcaagatttactctaagcacaccccaatcaacctgggtagggacctgcctcagggcttctcagctctggagccactggtggacctgcctatcggcatcaacatcaccaggttccagactctgctggctctgcacagaagctacctgactccaggagactcatcttctggatggactgctggagctgctgcttactacgtgggttacctgcagcctcgcaccttcctgctgaagtacaacgaaaacggcaccatcactgacgccgtcgactgcgctctggaccctctgtctgaaaccaagtgcactctgaagtcattcaccgtggagaagggcatctaccagacttccaacttccgcgtgcagcccaccgaaagcatcgtccgtttccctaacatcactaacctgtgccccttcgacgaggtcttcaacgccacccgtttcgcttctgtgtacgcctggaaccgcaagcgtatctctaactgcgtcgccgactactcagtgctgtacaacttcgctcccttcttcgccttcaagtgctacggagtgtcaccaactaagctgaacgacctgtgcttcaccaacgtctacgctgactctttcgtgatcaggggtaacgaggtctcacagatcgctccaggccagactggaaacatcgccgactacaactacaagctgcctgacgacttcaccggttgcgtcatcgcttggaactccaacaagctggacagcaccgtgggtggcaactacaactaccgttacaggctgttcagaaagtccaagctgaagcccttcgagcgtgacatcagcactgaaatctaccaggctggtaacaagccatgcaacggtgtcgccggcgtcaactgctacttccccctgcagtcctacggcttccgtccaacctacggtgtgggccaccagccttacagggtggtcgtgctgtccttcgaactcctccacgctccagctactgtgtgcggaccaaagaagagcaccaacctggtcaagaacaagtgcgtgaacttcaacttcaacggtctgaccggaactggtgtcctgaccgagtctaacaagaagttcctgcccttccagcagttcggtcgtgacatcgctgacactaccgacgccgtgagggacccccagaccctggaaatcctggacatcactccatgctctttcggaggtgtctcagtgatcactccaggaaccaacacttcaaaccaggtcgctgtgctgtaccagggtgtcaactgcaccgaagtccctgtggccatccacgctgaccagctgacccccacttggagagtgtacagcaccggctctaacgtcttccagactcgcgctggttgcctgatcggcgccgagtacgtgaacaactcttacgaatgcgacatccccatcggcgctggaatctgcgcctcataccagacccagactaagtcccaccagcaggctcagagcgtcgcctcacagtccatcatcgcttacaccatgtctctgggcgctgaaaactcagtggcctactcaaacaactccatcgccatccctaccaacttcactatctccgtgaccactgagatcctgcccgtctccatgaccaagactagcgtggactgcactatgtacatctgcggagactccaccgaatgcagcaacctgctgctgcagtacggtagcttctgcacccagctgaagcgtgctctgactggcatcgccgtggagcaggacaagaacactcaggaagtcttcgctcaggtgaagcaaatctacaagacccctcccatcaagtacttcggcggattcaacttctcccagatcctgcctgaccccagcaagccatctaagagatcattcatcgaggacctgctgttcaacaaggtcactctggccgacgctggtttcatcaagcagtacggagactgcctgggtgacatcgccgctcgcgacctgatctgcgctcagaagttcaacggcctgaccgtgctgccacctctgctgactgacgaaatgatcgcccagtacacttccgccctgctggctggaaccatcacttctggttggaccttcggtgctggtgctgctctgcagatccctttcgctatgcagatggcctacaggttcaacggaatcggtgtcacccagaacgtgctgtacgagaaccagaagctgatcgctaaccagttcaactccgccatcggcaagatccaggactccctgagctctactgccagcgctctgggaaagctgcaggacgtcgtgaaccacaacgcccaggctctgaacaccctggtcaagcagctgtcatccaagttcggagctatcagctctgtgctgaacgacatcctctcccgcctggaccctcctgaggctgaagtccagatcgacaggctgatcactggtagactgcagtctctgcagacctacgtgactcagcagctgatccgcgccgctgaaatccgtgcctcagctaacctggccgctaccaagatgtctgagtgcgtcctgggccagagcaagagggtggacttctgcggcaagggataccacctgatgtctttccctcagtcagctccccacggagtcgtgttcctgcacgtcacctacgtgccagcccaggagaagaacttcaccactgcccctgctatctgccacgacggcaaggctcacttcccccgtgaaggagtcttcgtgtccaacggcacccactggttcgtcactcagaggaacttctacgagccacagatcatcaccactgacaacactttcgtgagcggcaactgcgacgtggtcatcggtatcgtcaacaacaccgtgtacgaccccctgcagccagagctggactccttcaaggaagagctggacaagtacttcaagaaccacaccagcccagacgtcgacctgggcgacatctctggaatcaacgcttcagtcgtgaacatccagaaggagatcgaccgtctgaacgaagtggccaagaacctgaacgaatctctgatcgacctgcaggagctgggaaagtacgaacagtacatcaagtggccttggtacatctggctgggtttcatcgctggcctcatcgctatcgtgatggtgaccatcatgctgtgctgcatgacttcctgctgcagctgcctgaagggctgctgctcttgcggatcatgctgcaagttcgacgaggacgactcagaacccgtcctgaagggcgtgaagctgcactacacctaa

SEQ ID NO: 217 - protein, 1257 aa, synthetic construct; identical to SEQ ID NO: 175

SEQ ID NO: 218 - protein, 1257 aa, synthetic construct; identical to SEQ ID NO: 195

SEQ ID NO: 219 - protein, 1257 aa, synthetic construct
QCVNLITRTQSYTNSFTRGVYYPDKVFRSSVLHSTQDLFLPFFSNVTWFHAIHVSGTNGTKRFDNPVLPFNDGVYFASTEKSNIIRGWIFGTTLDSKTQSLLIVNNATNVVIKVCEFQFCNDPFLDVYYHKNNKSWMESEFRVYSSANNCTFEYVSQPFLMDLEGKQGNFKNLREFVFKNIDGYFKIYSKHTPINLGRDLPQGFSALEPLVDLPIGINITRFQTLLALHRSYLTPGDSSSGWTAGAAAYYVGYLQPRTFLLKYNENGTITDAVDCALDPLSETKCTLKSFTVEKGIYQTSNFRVQPTESIVRFPNITNLCPFDEVFNATRFASVYAWNRKRISNCVADYSVLYNFAPFFAFKCYGVSPTKLNDLCFTNVYADSFVIRGNEVSQIAPGQTGNIADYNYKLPDDFTGCVIAWNSNKLDSKVGGNYNYQYRLFRKSNLKPFERDISTEIYQAGNKPCNGVAGFNCYFPLRSYGFRPTYGVGHQPYRVVVLSFELLHAPATVCGPKKSTNLVKNKCVNFNFNGLTGTGVLTESNKKFLPFQQFGRDIADTTDAVRDPQTLEILDITPCSFGGVSVITPGTNTSNQVAVLYQGVNCTEVPVAIHADQLTPTWRVYSTGSNVFQTRAGCLIGAEYVNNSYECDIPIGAGICASYQTQTKSHQQAQSVASQSIIAYTMSLGAENLVAYSNNSIAIPTNFTISVTTEILPVSMTKTSVDCTMYICGDSTECSNLLLQYGSFCTQLKRALTGIAVEQDKNTQEVFAQVKQIYKTPPIKYFGGFNFSQILPDPSKPSKRSFIEDLLFNKVTLADAGFIKQYGDCLGDIAARDLICAQKFNGLTVLPPLLTDEMIAQYTSALLAGTITSGWTFGAGAALQIPFAMQMAYRFNGIGVTQNVLYENQKLIANQFNSAIGKIQDSLSSTASALGKLQDVVNHNAQALNTLVKQLSSKFGAISSVLNDILSRLDPPEAEVQIDRLITGRLQSLQTYVTQQLIRAAEIRASANLAATKMSECVLGQSKRVDFCGKGYHLMSFPQSAPHGVVFLHVTYVPAQEKNFTTAPAICHDGKAHFPREGVFVSNGTHWFVTQRNFYEPQIITTDNTFVSGNCDVVIGIVNNTVYDPLQPELDSFKEELDKYFKNHTSPDVDLGDISGINASVVNIQKEIDRLNEVAKNLNESLIDLQELGKYEQYIKWPWYIWLGFIAGLIAIVMVTIMLCCMTSCCSCLKGCCSCGSCCKFDEDDSEPVLKGVKLHYT

SEQ ID NO: 220 - protein, 1257 aa, synthetic construct; identical to SEQ ID NO: 186

SEQ ID NO: 221 - protein, 1255 aa, synthetic construct; identical to SEQ ID NO: 190

SEQ ID NO: 222 - protein, 1255 aa, synthetic construct; identical to SEQ ID NO: 192

SEQ ID NO: 223 - protein, 1257 aa, synthetic construct
QCVNLITRTQSYTNSFTRGVYYPDKVFRSSVLHSTQDLFLPFFSNVTWFHAIHVSGTNGTKRFDNPVLPFNDGVYFASTEKSNIIRGWIFGTTLDSKTQSLLIVNNATNVVIKVCEFQFCNDPFLDVYYHENNKSRMESELRVYSSANNCTFEYVSQPFLMDLEGKQGNFKNLREFVFKNIDGYFKIYSKHTPVNLGRDLPQGFSALEPLVDLPIGINITRFQTLLALHRSYLTPGDSSSSWTAGAAAYYVGYLQPRTFLLKYNENGTITDAVDCALDPLSETKCTLKSFTVEKGIYQTSNFRVQPTESIVRFPNITNLCPFHEVFNATRFASVYAWNRKRISNCVADYSVLYNFAPFFAFKCYGVSPTKLNDLCFTNVYADSFVIRGNEVSQIAPGQTGNIADYNYKLPDDFTGCVIAWNSNKLDSKVSGNYNYLYRLFRKSKLKPFERDISTEIYQAGNKPCNGVAGFNCYFPLQSYGFRPTYGVGHQPYRVVVLSFELLHAPATVCGPKKSTNLVKNKCVNFNFNGLTGTGVLTESNKKFLPFQQFGRDIADTTDAVRDPQTLEILDITPCSFGGVSVITPGTNTSNQVAVLYQGVNCTEVPVAIHADQLTPTWRVYSTGSNVFQTRAGCLIGAEYVNNSYECDIPIGAGICASYQTQTKSHQQAQSVASQSIIAYTMSLGAENSVAYSNNSIAIPTNFTISVTTEILPVSMTKTSVDCTMYICGDSTECSNLLLQYGSFCTQLKRALTGIAVEQDKNTQEVFAQVKQIYKTPPIKYFGGFNFSQILPDPSKPSKRSFIEDLLFNKVTLADAGFIKQYGDCLGDIAARDLICAQKFNGLTVLPPLLTDEMIAQYTSALLAGTITSGWTFGAGAALQIPFAMQMAYRFNGIGVTQNVLYENQKLIANQFNSAIGKIQDSLSSTASALGKLQDVVNHNAQALNTLVKQLSSKFGAISSVLNDILSRLDPPEAEVQIDRLITGRLQSLQTYVTQQLIRAAEIRASANLAATKMSECVLGQSKRVDFCGKGYHLMSFPQSAPHGVVFLHVTYVPAQEKNFTTAPAICHDGKAHFPREGVFVSNGTHWFVTQRNFYEPQIITTDNTFVSGNCDVVIGIVNNTVYDPLQPELDSFKEELDKYFKNHTSPDVDLGDISGINASVVNIQKEIDRLNEVAKNLNESLIDLQELGKYEQYIKWPWYIWLGFIAGLIAIVMVTIMLCCMTSCCSCLKGCCSCGSCCKFDEDDSEPVLKGVKLHYT

SEQ ID NO: 224 - protein, 1257 aa, synthetic construct
QCVNLITRTQSYTNSFTRGVYYPDKVFRSSVLHSTQDLFLPFFSNVTWFHAIHVSGTNGTKRFDNPVLPFNDGVYFASTEKSNIIRGWIFGTTLDSKTQSLLIVNNATNVVIKVCEFQFCNDPFLDVYYHENNKSRMESELRVYSSANNCTFEYVSQPFLMDLEGKQGNFKNLREFVFKNIDGYFKIYSKHTPVNLGRDLPQGFSALEPLVDLPIGINITRFQTLLALHRSYLTPGDSSSSWTAGAAAYYVGYLQPRTFLLKYNENGTITDAVDCALDPLSETKCTLKSFTVEKGIYQTSNFRVQPTESIVRFPNITNLCPFHEVFNATTFASVYAWNRKRISNCVADYSVLYNFAPFFAFKCYGVSPTKLNDLCFTNVYADSFVIRGNEVSQIAPGQTGNIADYNYKLPDDFTGCVIAWNSNKLDSKVSGNYNYRYRLFRKSKLKPFERDISTEIYQAGNKPCNGVAGSNCYFPLQSYGFRPTYGVGHQPYRVVVLSFELLHAPATVCGPKKSTNLVKNKCVNFNFNGLTGTGVLTESNKKFLPFQQFGRDIADTTDAVRDPQTLEILDITPCSFGGVSVITPGTNISNQVAVLYQGVNCTEVPVAIHADQLTPTWRVYSTGSNVFQTRAGCLIGAEYVNNSYECDIPIGAGICASYQTQTKSHQQAQSVASQSIIAYTMSLGAENSVAYSNNSIAIPTNFTISVTTEILPVSMTKTSVDCTMYICGDSTECSNLLLQYGSFCTQLKRALTGIAVEQDKNTQEVFAQVKQIYKTPPIKYFGGFNFSQILPDPSKPSKRSFIEDLLFNKVTLADAGFIKQYGDCLGDIAARDLICAQKFNGLTVLPPLLTDEMIAQYTSALLAGTITSGWTFGAGAALQIPFAMQMAYRFNGIGVTQNVLYENQKLIANQFNSAIGKIQDSLSSTASALGKLQDVVNHNAQALNTLVKQLSSKFGAISSVLNDILSRLDPPEAEVQIDRLITGRLQSLQTYVTQQLIRAAEIRASANLAATKMSECVLGQSKRVDFCGKGYHLMSFPQSAPHGVVFLHVTYVPAQEKNFTTAPAICHDGKAHFPREGVFVSNGTHWFVTQRNFYEPQIITTDNTFVSGNCDVVIGIVNNTVYDPLQPELDSFKEELDKYFKNHTSPDVDLGDISGINASVVNIQKEIDRLNEVAKNLNESLINLQELGKYEQYIKWPWYIWLGFIAGLIAIVMVTIMLCCMTSCCSCLKGCCSCGSCCKFDEDDSEPVLKGVKLHYT

SEQ ID NO: 225 - protein, 1255 aa, synthetic construct
QCVNLITRTQSYTNSFTRGVYYPDKVFRSSVLHSTQDLFLPFFSNVTWFHAISGTNGTKRFDNPVLPFNDGVYFASTEKSNIIRGWIFGTTLDSKTQSLLIVNNATNVVIKVCEFQFCNDPFLDVYYHKNNKSWMESEFRVYSSANNCTFEYVSQPFLMDLEGKQGNFKNLREFVFKNIDGYFKIYSKHTPINLGRDLPQGFSALEPLVDLPIGINITRFQTLLALHRSYLTPGDSSSGWTAGAAAYYVGYLQPRTFLLKYNENGTITDAVDCALDPLSETKCTLKSFTVEKGIYQTSNFRVQPTESIVRFPNITNLCPFDEVFNATTFASVYAWNRKRISNCVADYSVLYNFAPFFAFKCYGVSPTKLNDLCFTNVYADSFVIRGNEVSQIAPGQTGNIADYNYKLPDDFTGCVIAWNSNKLDSKVGGNYNYRYRLFRKSNLKPFERDISTEIYQAGNKPCNGVAGVNCYFPLQSYGFRPTYGVGHQPYRVVVLSFELLHAPATVCGPKKSTNLVKNKCVNFNFNGLTGTGVLTESNKKFLPFQQFGRDIADTTDAVRDPQTLEILDITPCSFGGVSVITPGTNTSNQVAVLYQGVNCTEVPVAIHADQLTPTWRVYSTGSNVFQTRAGCLIGAEYVNSSYECDIPIGAGICASYQTQTKSHQQAQSVASQSIIAYTMSLGAENSVAYSNNSIAIPTNFTISVTTEILPVSMTKTSVDCTMYICGDSTECSNLLLQYGSFCTQLKRALTGIAVEQDKNTQEVFAQVKQIYKTPPIKYFGGFNFSQILPDPSKPSKRSFIEDLLFNKVTLADAGFIKQYGDCLGDIAARDLICAQKFNGLTVLPPLLTDEMIAQYTSALLAGTITSGWTFGAGAALQIPFAMQMAYRFNGIGVTQNVLYENQKLIANQFNSAIGKIQDSLSSTASALGKLQDVVNHNAQALNTLVKQLSSKFGAISSVLNDILSRLDPPEAEVQIDRLITGRLQSLQTYVTQQLIRAAEIRASANLAATKMSECVLGQSKRVDFCGKGYHLMSFPQSAPHGVVFLHVTYVPAQEKNFTTAPAICHDGKAHFPREGVFVSNGTHWFVTQRNFYEPQIITTDNTFVSGNCDVVIGIVNNTVYDPLQPELDSFKEELDKYFKNHTSPDVDLGDISGINASVVNIQKEIDRLNEVAKNLNESLIDLQELGKYEQYIKWPWYIWLGFIAGLIAIVMVTIMLCCMTSCCSCLKGCCSCGSCCKFDEDDSEPVLKGVKLHYT

SEQ ID NO: 226 - protein, 1255 aa, synthetic construct
QCVNLITRTQSYTNSFTRGVYYPDKVFRSSVLHSTQDLFLPFFSNVTWFHAISGTNGTKRFDNPVLPFNDGVYFASTEKSNIIRGWIFGTTLDSKTQSLLIVNNATNVVIKVCEFQFCNDPFLDVYYHKNNKSWMESEFRVYSSANNCTFEYVSQPFLMDLEGKQGNFKNLREFVFKNIDGYFKIYSKHTPINLGRDLPQGFSALEPLVDLPIGINITRFQTLLALHRSYLTPGDSSSGWTAGAAAYYVGYLQPRTFLLKYNENGTITDAVDCALDPLSETKCTLKSFTVEKGIYQTSNFRVQPTESIVRFPNITNLCPFDEVFNATTFASVYAWNRKRISNCVADYSVLYNFAPFFAFKCYGVSPTKLNDLCFTNVYADSFVIRGNEVSQIAPGQTGNIADYNYKLPDDFTGCVIAWNSNKLDSKVGGNYNYRYRLFRKSNLKPFERDISTEIYQAGNKPCNGVAGVNCYFPLQSYGFRPTYGVGHQPYRVVVLSFELLHAPATVCGPKKSTNLVKNKCVNFNFNGLTGTGVLTESNKKFLPFQQFGRDIADTTDAVRDPQTLEILDITPCSFGGVSVITPGTNTSNQVAVLYQGVNCTEVPVAIHADQLTPTWRVYSTGSNVFQTRAGCLIGAEYVNNSYECDIPIGAGICASYQTQTKSHQQAQSVASQSIIAYTMSLGAENSVAYSNNSIAIPTNFTISVTTEILPVSMTKTSVDCTMYICGDSTECSNLLLQYGSFCTQLKRALTGIAVEQDKNTQEVFAQVKQIYKTPPIKYFGGFNFSQILPDPSKPSKRSFIEDLLFNKVTLADAGFIKQYGDCLGDIAARDLICAQKFNGLTVLPPLLTDEMIAQYTSALLAGTITSGWTFGAGAALQIPFAMQMAYRFNGIGVTQNVLYENQKLIANQFNSAIGKIQDSLSSTASALGKLQDVVNHNAQALNTLVKQLSSKFGAISSVLNDILSRLDPPEAEVQIDRLITGRLQSLQTYVTQQLIRAAEIRASANLAATKMSECVLGQSKRVDFCGKGYHLMSFPQSAPHGVVFLHVTYVPAQEKNFTTAPAICHDGKAHFPREGVFVSNGTHWFVTQRNFYEPQIITTDNTFVSGNCDVVIGIVNNTVYDPLQPELDSFKEELDKYFKNHTSPDVDLGDISGINASVVNIQKEIDRLNEVAKNLNESLIDLQELGKYEQYIKWPWYIWLGFIAGLIAIVMVTIMLCCMTSCCSCLKGCCSCGSCCKFDEDDSEPVLKGVKLHYT

SEQ ID NO: 227 - protein, 1255 aa, synthetic construct
QCVNLITRTQSYTNSFTRGVYYPDKVFRSSVLHSTQDLFLPFFSNVTWFHAISGTNGTKRFDNPVLPFNDGVYFASTEKSNIIRGWIFGTTLDSKTQSLLIVNNATNVVIKVCEFQFCNDPFLDVYYHKNNKSWMESEFRVYSSANNCTFEYVSQPFLMDLEGKQGNFKNLREFVFKNIDGYFKIYSKHTPINLGRDLPQGFSALEPLVDLPIGINITRFQTLLALHRSYLTPGDSSSGWTAGAAAYYVGYLQPRTFLLKYNENGTITDAVDCALDPLSETKCTLKSFTVEKGIYQTSNFRVQPTESIVRFPNITNLCPFDEVFNATTFASVYAWNRKRISNCVADYSVLYNFAPFFAFKCYGVSPTKLNDLCFTNVYADSFVIRGNEVSQIAPGQTGNIADYNYKLPDDFTGCVIAWNSNKLDSTVGGNYNYRYRLFRKSKLKPFERDISTEIYQAGNKPCNGVAGVNCYFPLQSYGFRPTYGVGHQPYRVVVLSFELLHAPATVCGPKKSTNLVKNKCVNFNFNGLTGTGVLTESNKKFLPFQQFGRDIADTTDAVRDPQTLEILDITPCSFGGVSVITPGTNTSNQVAVLYQGVNCTEVPVAIHADQLTPTWRVYSTGSNVFQTRAGCLIGAEYVNNSYECDIPIGAGICASYQTQTKSHQQAQSVASQSIIAYTMSLGAENSVAYSNNSIAIPTNFTISVTTEILPVSMTKTSVDCTMYICGDSTECSNLLLQYGSFCTQLKRALTGIAVEQDKNTQEVFAQVKQIYKTPPIKYFGGFNFSQILPDPSKPSKRSFIEDLLFNKVTLADAGFIKQYGDCLGDIAARDLICAQKFNGLTVLPPLLTDEMIAQYTSALLAGTITSGWTFGAGAALQIPFAMQMAYRFNGIGVTQNVLYENQKLIANQFNSAIGKIQDSLSSTASALGKLQDVVNHNAQALNTLVKQLSSKFGAISSVLNDILSRLDPPEAEVQIDRLITGRLQSLQTYVTQQLIRAAEIRASANLAATKMSECVLGQSKRVDFCGKGYHLMSFPQSAPHGVVFLHVTYVPAQEKNFTTAPAICHDGKAHFPREGVFVSNGTHWFVTQRNFYEPQIITTDNTFVSGNCDVVIGIVNNTVYDPLQPELDSFKEELDKYFKNHTSPDVDLGDISGINASVVNIQKEIDRLNEVAKNLNESLIDLQELGKYEQYIKWPWYIWLGFIAGLIAIVMVTIMLCCMTSCCSCLKGCCSCGSCCKFDEDDSEPVLKGVKLHYT

SEQ ID NO: 228 - protein, 1255 aa, synthetic construct
QCVNLITRTQSYTNSFTRGVYYPDKVFRSSVLHSTQDLFLPFFSNVTWFHAISGTNGTKRFDNPVLPFNDGVYFASTEKSNIIRGWIFGTTLDSKTQSLLIVNNATNVVIKVCEFQFCNDPFLDVYYHKNNKSWMESEFRVYSSANNCTFEYVSQPFLMDLEGKQGNFKNLREFVFKNIDGYFKIYSKHTPINLGRDLPQGFSALEPLVDLPIGINITRFQTLLALHRSYLTPGDSSSGWTAGAAAYYVGYLQPRTFLLKYNENGTITDAVDCALDPLSETKCTLKSFTVEKGIYQTSNFRVQPTESIVRFPNITNLCPFDEVFNATRFASVYAWNRKRISNCVADYSVLYNFAPFFAFKCYGVSPTKLNDLCFTNVYADSFVIRGNEVSQIAPGQTGNIADYNYKLPDDFTGCVIAWNSNKLDSTVGGNYNYRYRLFRKSKLKPFERDISTEIYQAGNKPCNGVAGVNCYFPLQSYGFRPTYGVGHQPYRVVVLSFELLHAPATVCGPKKSTNLVKNKCVNFNFNGLTGTGVLTESNKKFLPFQQFGRDIADTTDAVRDPQTLEILDITPCSFGGVSVITPGTNTSNQVAVLYQGVNCTEVPVAIHADQLTPTWRVYSTGSNVFQTRAGCLIGAEYVNNSYECDIPIGAGICASYQTQTKSHQQAQSVASQSIIAYTMSLGAENSVAYSNNSIAIPTNFTISVTTEILPVSMTKTSVDCTMYICGDSTECSNLLLQYGSFCTQLKRALTGIAVEQDKNTQEVFAQVKQIYKTPPIKYFGGFNFSQILPDPSKPSKRSFIEDLLFNKVTLADAGFIKQYGDCLGDIAARDLICAQKFNGLTVLPPLLTDEMIAQYTSALLAGTITSGWTFGAGAALQIPFAMQMAYRFNGIGVTQNVLYENQKLIANQFNSAIGKIQDSLSSTASALGKLQDVVNHNAQALNTLVKQLSSKFGAISSVLNDILSRLDPPEAEVQIDRLITGRLQSLQTYVTQQLIRAAEIRASANLAATKMSECVLGQSKRVDFCGKGYHLMSFPQSAPHGVVFLHVTYVPAQEKNFTTAPAICHDGKAHFPREGVFVSNGTHWFVTQRNFYEPQIITTDNTFVSGNCDVVIGIVNNTVYDPLQPELDSFKEELDKYFKNHTSPDVDLGDISGINASVVNIQKEIDRLNEVAKNLNESLIDLQELGKYEQYIKWPWYIWLGFIAGLIAIVMVTIMLCCMTSCCSCLKGCCSCGSCCKFDEDDSEPVLKGVKLHYT

SEQ ID NO: 229 - protein, 1267 aa, synthetic construct
MFVFLVLLPLVSSQCVNLITRTQSYTNSFTRGVYYPDKVFRSSVLHSTQDLFLPFFSNVTWFHAISGTNGTKRFDNPVLPFNDGVYFASTEKSNIIRGWIFGTTLDSKTQSLLIVNNATNVVIKVCEFQFCNDPFLDVYQKNNKSWMESEFRVYSSANNCTFEYVSQPFLMDLEGKEGNFKNLREFVFKNIDGYFKIYSKHTPINLERDLPQGFSALEPLVDLPIGINITRFQTLLALHRSYLTPGDSSSGWTAGAAAYYVGYLQPRTFLLKYNENGTITDAVDCALDPLSETKCTLKSFTVEKGIYQTSNFRVQPTESIVRFPNITNLCPFHEVFNATTFASVYAWNRKRISNCVADYSVIYNFAPFFAFKCYGVSPTKLNDLCFTNVYADSFVIRGNEVSQIAPGQTGNIADYNYKLPDDFTGCVIAWNSNKLDSKPSGNYNYLYRLFRKSKLKPFERDISTEIYQAGNKPCNGVAGSNCYSPLQSYGFRPTYGVGHQPYRVVVLSFELLHAPATVCGPKKSTNLVKNKCVNFNFNGLTGTGVLTESNKKFLPFQQFGRDIADTTDAVRDPQTLEILDITPCSFGGVSVITPGTNTSNQVAVLYQGVNCTEVPVAIHADQLTPTWRVYSTGSNVFQTRAGCLIGAEYVNNSYECDIPIGAGICASYQTQTKSHQQAQSVASQSIIAYTMSLGAENSVAYSNNSIAIPTNFTISVTTEILPVSMTKTSVDCTMYICGDSTECSNLLLQYGSFCTQLKRALTGIAVEQDKNTQEVFAQVKQIYKTPPIKYFGGFNFSQILPDPSKPSKRSFIEDLLFNKVTLADAGFIKQYGDCLGDIAARDLICAQKFNGLTVLPPLLTDEMIAQYTSALLAGTITSGWTFGAGAALQIPFAMQMAYRFNGIGVTQNVLYENQKLIANQFNSAIGKIQDSLSSTASALGKLQDVVNHNAQALNTLVKQLSSKFGAISSVLNDILSRLDPPEAEVQIDRLITGRLQSLQTYVTQQLIRAAEIRASANLAATKMSECVLGQSKRVDFCGKGYHLMSFPQSAPHGVVFLHVTYVPAQEKNFTTAPAICHDGKAHFPREGVFVSNGTHWFVTQRNFYEPQIITTDNTFVSGNCDVVIGIVNNTVYDPLQPELDSFKEELDKYFKNHTSPDVDLGDISGINASVVNIQKEIDRLNEVAKNLNESLIDLQELGKYEQYIKWPWYIWLGFIAGLIAIVMVTIMLCCMTSCCSCLKGCCSCGSCCKFDEDDSEPVLKGVKLHYT

SEQ ID NO: 230 - protein, 1269 aa, synthetic construct
MFVFLVLLPLVSSQCVNLITRTQSYTNSFTRGVYYPDKVFRSSVLHSTQDLFLPFFSNVTWFHAIHVSGTNGTKRFDNPALPFNDGVYFASTEKSNIIRGWIFGTTLDSKTQSLLIVNNATNVVIKVCEFQFCNDPFLDVYQKNNKSWMESEFRVYSSANNCTFEYVSQPFLMDLEGKEGNFKNLREFVFKNIDGYFKIYSKHTPINLERDLPQGFSALEPLVDLPIGINITRFQTLLALHRSYLTPVDSSSGWTAGAAAYYVGYLQPRTFLLKYNENGTITDAVDCALDPLSETKCTLKSFTVEKGIYQTSNFRVQPTESIVRFPNITNLCPFHEVFNATTFASVYAWNRKRISNCVADYSVIYNFAPFFAFKCYGVSPTKLNDLCFTNVYADSFVIRGNEVSQIAPGQTGNIADYNYKLPDDFTGCVIAWNSNKLDSKPSGNYNYLYRLFRKSKLKPFERDISTEIYQAGNKPCNGVAGSNCYSPLQSYGFRPTYGVGHQPYRVVVLSFELLHAPATVCGPKKSTNLVKNKCVNFNFNGLTGTGVLTESNKKFLPFQQFGRDIADTTDAVRDPQTLEILDITPCSFGGVSVITPGTNTSNQVAVLYQGVNCTEVPVAIHADQLTPTWRVYSTGSNVFQTRAGCLIGAEYVNNSYECDIPIGAGICASYQTQTKSHQQAQSVASQSIIAYTMSLGAENSVAYSNNSIAIPTNFTISVTTEILPVSMTKTSVDCTMYICGDSTECSNLLLQYGSFCTQLKRALTGIAVEQDKNTQEVFAQVKQIYKTPPIKYFGGFNFSQILPDPSKPSKRSFIEDLLFNKVTLADAGFIKQYGDCLGDIAARDLICAQKFNGLTVLPPLLTDEMIAQYTSALLAGTITSGWTFGAGAALQIPFAMQMAYRFNGIGVTQNVLYENQKLIANQFNSAIGKIQDSLSSTASALGKLQDVVNHNAQALNTLVKQLSSKFGAISSVLNDILSRLDPPEAEVQIDRLITGRLQSLQTYVTQQLIRAAEIRASANLAATKMSECVLGQSKRVDFCGKGYHLMSFPQSAPHGVVFLHVTYVPAQEKNFTTAPAICHDGKAHFPREGVFVSNGTHWFVTQRNFYEPQIITTDNTFVSGNCDVVIGIVNNTVYDPLQPELDSFKEELDKYFKNHTSPDVDLGDISGINASVVNIQKEIDRLNEVAKNLNESLIDLQELGKYEQYIKWPWYIWLGFIAGLIAIVMVTIMLCCMTSCCSCLKGCCSCGSCCKFDEDDSEPVLKGVKLHYT

SEQ ID NO: 231 - protein, 1267 aa, synthetic construct
MFVFLVLLPLVSSQCVNLITRTQSYTNSFTRGVYYPDKVFRSSVLHSTQDLFLPFFSNVTWFHAISGTNGTKRFDNPVLPFNDGVYFASTEKSNIIRGWIFGTTLDSKTQSLLIVNNATNVVIKVCEFQFCNDPFLDVYHKNNKSWMESEFRVYSSANNCTFEYVSQPFLMDLEGKQGNFKNLREFVFKNIDGYFKIYSKHTPINLGRDLPQGFSALEPLVDLPIGINITRFQTLLALHRSYLTPGDSSSGWTAGAAAYYVGYLQPRTFLLKYNENGTITDAVDCALDPLSETKCTLKSFTVEKGIYQTSNFRVQPTESIVRFPNITNLCPFDEVFNATTFASVYAWNRKRISNCVADYSVLYNFAPFFAFKCYGVSPTKLNDLCFTNVYADSFVIRGNEVSQIAPGQTGNIADYNYKLPDDFTGCVIAWNSNKLDSKVGGNYNYRYRLFRKSNLKPFERDISTEIYQAGNKPCNGVAGVNCYFPLQSYGFRPTYGVGHQPYRVVVLSFELLHAPATVCGPKKSTNLVKNKCVNFNFNGLTGTGVLTESNKKFLPFQQFGRDIADTTDAVRDPQTLEILDITPCSFGGVSVITPGTNTSNQVAVLYQGVNCTEVPVAIHADQLTPTWRVYSTGSNVFQTRAGCLIGAEYVNNSYECDIPIGAGICASYQTQTKSHQQAQSVASQSIIAYTMSLGAENSVAYSNNSIAIPTNFTISVTTEILPVSMTKTSVDCTMYICGDSTECSNLLLQYGSFCTQLKRALTGIAVEQDKNTQEVFAQVKQIYKTPPIKYFGGFNFSQILPDPSKPSKRSFIEDLLFNKVTLADAGFIKQYGDCLGDIAARDLICAQKFNGLTVLPPLLTDEMIAQYTSALLAGTITSGWTFGAGAALQIPFAMQMAYRFNGIGVTQNVLYENQKLIANQFNSAIGKIQDSLSSTASALGKLQDVVNHNAQALNTLVKQLSSKFGAISSVLNDILSRLDPPEAEVQIDRLITGRLQSLQTYVTQQLIRAAEIRASANLAATKMSECVLGQSKRVDFCGKGYHLMSFPQSAPHGVVFLHVTYVPAQEKNFTTAPAICHDGKAHFPREGVFVSNGTHWFVTQRNFYEPQIITTDNTFVSGNCDVVIGIVNNTVYDPLQPELDSFKEELDKYFKNHTSPDVDLGDISGINASVVNIQKEIDRLNEVAKNLNESLIDLQELGKYEQYIKWPWYIWLGFIAGLIAIVMVTIMLCCMTSCCSCLKGCCSCGSCCKFDEDDSEPVLKGVKLHYT

SEQ ID NO: 232 - protein, 1270 aa, synthetic construct
MFVFLVLLPLVSSQCVNLITRTQSYTNSFTRGVYYPDKVFRSSVLHSTQDLFLPFFSNVTWFHAIHVSGTNGTKRFDNPVLPFNDGVYFASTEKSNIIRGWIFGTTLDSKTQSLLIVNNATNVVIKVCEFQFCNDPFLDVYYHXNNKSRMESELRVYSSANNCTFEYVSQPFLMDLEGKQGNFKNLREFVFKNIDGYFKIYSKHTPVNLGRDLPQGFSALEPLVDLPIGINITRFQTLLALHRSYLTPGDSSSSWTAGAAAYYVGYLQPRTFLLKYNENGTITDAVDCALDPLSETKCTLKSFTVEKGIYQTSNFRVQPTESIVRFPNITNLCPFHEVFNATTFASVYAWNRTRISNCVADYSVLYNFAPFFAFKCYGVSPTKLNDLCFTNVYADSFVIRGNEVSQIAPGQTGNIADYNYKLPDDFTGCVIAWNSNKLDSKVSGNYNYLYRLFRKSKLKPFERDISTEIYQAGNKPCNGVAGFNCYSPLQSYGFRPTYGVGHQPYRVVVLSFELLHAPATVCGPKKSTNLVKNKCVNFNFNGLTGTGVLTESNKKFLPFQQFGRDIADTTDAVRDPQTLEILDITPCSFGGVSVITPGTNTSNQVAVLYQGVNCTEVPVAIHADQLTPTWRVYSTGSNVFQTRAGCLIGAEYVNNSYECDIPIGAGICASYQTQTKSHQQAQSVASQSIIAYTMSLGAENSVAYSNNSIAIPTNFTISVTTEILPVSMTKTSVDCTMYICGDSTECSNLLLQYGSFCTQLKRALTGIAVEQDKNTQEVFAQVKQIYKTPPIKYFGGFNFSQILPDPSKPSKRSFIEDLLFNKVTLADAGFIKQYGDCLGDIAARDLICAQKFNGLTVLPPLLTDEMIAQYTSALLAGTITSGWTFGAGAALQIPFAMQMAYRFNGIGVTQNVLYENQKLIANQFNSAIGKIQDSLSSTASALGKLQDVVNHNAQALNTLVKQLSSKFGAISSVLNDILSRLDPPEAEVQIDRLITGRLQSLQTYVTQQLIRAAEIRASANLAATKMSECVLGQSKRVDFCGKGYHLMSFPQSAPHGVVFLHVTYVPAQEKNFTTAPAICHDGKAHFPREGVFVSNGTHWFVTQRNFYEPQIITTDNTFVSGNCDVVIGIVNNTVYDPLQPELDSFKEELDKYFKNHTSPDVDLGDISGINASVVNIQKEIDRLNEVAKNLNESLIDLQELGKYEQYIKWPWYIWLGFIAGLIAIVMVTIMLCCMTSCCSCLKGCCSCGSCCKFDEDDSEPVLKGVKLHYT

SEQ ID NO: 233 - protein, 1254 aa, synthetic construct
QCVNLITRTQSYTNSFTRGVYYPDKVFRSSVLHSTQDLFLPFFSNVTWFHAISGTNGTKRFDNPVLPFNDGVYFASTEKSNIIRGWIFGTTLDSKTQSLLIVNNATNVVIKVCEFQFCNDPFLDVYQKNNKSWMESEFRVYSSANNCTFEYVSQPFLMDLEGKEGNFKNLREFVFKNIDGYFKIYSKHTPINLERDLPQGFSALEPLVDLPIGINITRFQTLLALHRSYLTPGDSSSGWTAGAAAYYVGYLQPRTFLLKYNENGTITDAVDCALDPLSETKCTLKSFTVEKGIYQTSNFRVQPTESIVRFPNITNLCPFHEVFNATTFASVYAWNRKRISNCVADYSVIYNFAPFFAFKCYGVSPTKLNDLCFTNVYADSFVIRGNEVSQIAPGQTGNIADYNYKLPDDFTGCVIAWNSNKLDSKPSGNYNYLYRLFRKSKLKPFERDISTEIYQAGNKPCNGVAGSNCYSPLQSYGFRPTYGVGHQPYRVVVLSFELLHAPATVCGPKKSTNLVKNKCVNFNFNGLTGTGVLTESNKKFLPFQQFGRDIADTTDAVRDPQTLEILDITPCSFGGVSVITPGTNTSNQVAVLYQGVNCTEVPVAIHADQLTPTWRVYSTGSNVFQTRAGCLIGAEYVNNSYECDIPIGAGICASYQTQTKSHQQAQSVASQSIIAYTMSLGAENSVAYSNNSIAIPTNFTISVTTEILPVSMTKTSVDCTMYICGDSTECSNLLLQYGSFCTQLKRALTGIAVEQDKNTQEVFAQVKQIYKTPPIKYFGGFNFSQILPDPSKPSKRSFIEDLLFNKVTLADAGFIKQYGDCLGDIAARDLICAQKFNGLTVLPPLLTDEMIAQYTSALLAGTITSGWTFGAGAALQIPFAMQMAYRFNGIGVTQNVLYENQKLIANQFNSAIGKIQDSLSSTASALGKLQDVVNHNAQALNTLVKQLSSKFGAISSVLNDILSRLDPPEAEVQIDRLITGRLQSLQTYVTQQLIRAAEIRASANLAATKMSECVLGQSKRVDFCGKGYHLMSFPQSAPHGVVFLHVTYVPAQEKNFTTAPAICHDGKAHFPREGVFVSNGTHWFVTQRNFYEPQIITTDNTFVSGNCDVVIGIVNNTVYDPLQPELDSFKEELDKYFKNHTSPDVDLGDISGINASVVNIQKEIDRLNEVAKNLNESLIDLQELGKYEQYIKWPWYIWLGFIAGLIAIVMVTIMLCCMTSCCSCLKGCCSCGSCCKFDEDDSEPVLKGVKLHYT

SEQ ID NO: 234 - protein, 1256 aa, synthetic construct
QCVNLITRTQSYTNSFTRGVYYPDKVFRSSVLHSTQDLFLPFFSNVTWFHAIHVSGTNGTKRFDNPALPFNDGVYFASTEKSNIIRGWIFGTTLDSKTQSLLIVNNATNVVIKVCEFQFCNDPFLDVYQKNNKSWMESEFRVYSSANNCTFEYVSQPFLMDLEGKEGNFKNLREFVFKNIDGYFKIYSKHTPINLERDLPQGFSALEPLVDLPIGINITRFQTLLALHRSYLTPVDSSSGWTAGAAAYYVGYLQPRTFLLKYNENGTITDAVDCALDPLSETKCTLKSFTVEKGIYQTSNFRVQPTESIVRFPNITNLCPFHEVFNATTFASVYAWNRKRISNCVADYSVIYNFAPFFAFKCYGVSPTKLNDLCFTNVYADSFVIRGNEVSQIAPGQTGNIADYNYKLPDDFTGCVIAWNSNKLDSKPSGNYNYLYRLFRKSKLKPFERDISTEIYQAGNKPCNGVAGSNCYSPLQSYGFRPTYGVGHQPYRVVVLSFELLHAPATVCGPKKSTNLVKNKCVNFNFNGLTGTGVLTESNKKFLPFQQFGRDIADTTDAVRDPQTLEILDITPCSFGGVSVITPGTNTSNQVAVLYQGVNCTEVPVAIHADQLTPTWRVYSTGSNVFQTRAGCLIGAEYVNNSYECDIPIGAGICASYQTQTKSHQQAQSVASQSIIAYTMSLGAENSVAYSNNSIAIPTNFTISVTTEILPVSMTKTSVDCTMYICGDSTECSNLLLQYGSFCTQLKRALTGIAVEQDKNTQEVFAQVKQIYKTPPIKYFGGFNFSQILPDPSKPSKRSFIEDLLFNKVTLADAGFIKQYGDCLGDIAARDLICAQKFNGLTVLPPLLTDEMIAQYTSALLAGTITSGWTFGAGAALQIPFAMQMAYRFNGIGVTQNVLYENQKLIANQFNSAIGKIQDSLSSTASALGKLQDVVNHNAQALNTLVKQLSSKFGAISSVLNDILSRLDPPEAEVQIDRLITGRLQSLQTYVTQQLIRAAEIRASANLAATKMSECVLGQSKRVDFCGKGYHLMSFPQSAPHGVVFLHVTYVPAQEKNFTTAPAICHDGKAHFPREGVFVSNGTHWFVTQRNFYEPQIITTDNTFVSGNCDVVIGIVNNTVYDPLQPELDSFKEELDKYFKNHTSPDVDLGDISGINASVVNIQKEIDRLNEVAKNLNESLIDLQELGKYEQYIKWPWYIWLGFIAGLIAIVMVTIMLCCMTSCCSCLKGCCSCGSCCKFDEDDSEPVLKGVKLHYT

SEQ ID NO: 235 - protein, 1254 aa, synthetic construct
QCVNLITRTQSYTNSFTRGVYYPDKVFRSSVLHSTQDLFLPFFSNVTWFHAISGTNGTKRFDNPVLPFNDGVYFASTEKSNIIRGWIFGTTLDSKTQSLLIVNNATNVVIKVCEFQFCNDPFLDVYHKNNKSWMESEFRVYSSANNCTFEYVSQPFLMDLEGKQGNFKNLREFVFKNIDGYFKIYSKHTPINLGRDLPQGFSALEPLVDLPIGINITRFQTLLALHRSYLTPGDSSSGWTAGAAAYYVGYLQPRTFLLKYNENGTITDAVDCALDPLSETKCTLKSFTVEKGIYQTSNFRVQPTESIVRFPNITNLCPFDEVFNATTFASVYAWNRKRISNCVADYSVLYNFAPFFAFKCYGVSPTKLNDLCFTNVYADSFVIRGNEVSQIAPGQTGNIADYNYKLPDDFTGCVIAWNSNKLDSKVGGNYNYRYRLFRKSNLKPFERDISTEIYQAGNKPCNGVAGVNCYFPLQSYGFRPTYGVGHQPYRVVVLSFELLHAPATVCGPKKSTNLVKNKCVNFNFNGLTGTGVLTESNKKFLPFQQFGRDIADTTDAVRDPQTLEILDITPCSFGGVSVITPGTNTSNQVAVLYQGVNCTEVPVAIHADQLTPTWRVYSTGSNVFQTRAGCLIGAEYVNNSYECDIPIGAGICASYQTQTKSHQQAQSVASQSIIAYTMSLGAENSVAYSNNSIAIPTNFTISVTTEILPVSMTKTSVDCTMYICGDSTECSNLLLQYGSFCTQLKRALTGIAVEQDKNTQEVFAQVKQIYKTPPIKYFGGFNFSQILPDPSKPSKRSFIEDLLFNKVTLADAGFIKQYGDCLGDIAARDLICAQKFNGLTVLPPLLTDEMIAQYTSALLAGTITSGWTFGAGAALQIPFAMQMAYRFNGIGVTQNVLYENQKLIANQFNSAIGKIQDSLSSTASALGKLQDVVNHNAQALNTLVKQLSSKFGAISSVLNDILSRLDPPEAEVQIDRLITGRLQSLQTYVTQQLIRAAEIRASANLAATKMSECVLGQSKRVDFCGKGYHLMSFPQSAPHGVVFLHVTYVPAQEKNFTTAPAICHDGKAHFPREGVFVSNGTHWFVTQRNFYEPQIITTDNTFVSGNCDVVIGIVNNTVYDPLQPELDSFKEELDKYFKNHTSPDVDLGDISGINASVVNIQKEIDRLNEVAKNLNESLIDLQELGKYEQYIKWPWYIWLGFIAGLIAIVMVTIMLCCMTSCCSCLKGCCSCGSCCKFDEDDSEPVLKGVKLHYT

SEQ ID NO: 236 - protein, 1257 aa, synthetic construct
QCVNLITRTQSYTNSFTRGVYYPDKVFRSSVLHSTQDLFLPFFSNVTWFHAIHVSGTNGTKRFDNPVLPFNDGVYFASTEKSNIIRGWIFGTTLDSKTQSLLIVNNATNVVIKVCEFQFCNDPFLDVYYHXNNKSRMESELRVYSSANNCTFEYVSQPFLMDLEGKQGNFKNLREFVFKNIDGYFKIYSKHTPVNLGRDLPQGFSALEPLVDLPIGINITRFQTLLALHRSYLTPGDSSSSWTAGAAAYYVGYLQPRTFLLKYNENGTITDAVDCALDPLSETKCTLKSFTVEKGIYQTSNFRVQPTESIVRFPNITNLCPFHEVFNATTFASVYAWNRTRISNCVADYSVLYNFAPFFAFKCYGVSPTKLNDLCFTNVYADSFVIRGNEVSQIAPGQTGNIADYNYKLPDDFTGCVIAWNSNKLDSKVSGNYNYLYRLFRKSKLKPFERDISTEIYQAGNKPCNGVAGFNCYSPLQSYGFRPTYGVGHQPYRVVVLSFELLHAPATVCGPKKSTNLVKNKCVNFNFNGLTGTGVLTESNKKFLPFQQFGRDIADTTDAVRDPQTLEILDITPCSFGGVSVITPGTNTSNQVAVLYQGVNCTEVPVAIHADQLTPTWRVYSTGSNVFQTRAGCLIGAEYVNNSYECDIPIGAGICASYQTQTKSHQQAQSVASQSIIAYTMSLGAENSVAYSNNSIAIPTNFTISVTTEILPVSMTKTSVDCTMYICGDSTECSNLLLQYGSFCTQLKRALTGIAVEQDKNTQEVFAQVKQIYKTPPIKYFGGFNFSQILPDPSKPSKRSFIEDLLFNKVTLADAGFIKQYGDCLGDIAARDLICAQKFNGLTVLPPLLTDEMIAQYTSALLAGTITSGWTFGAGAALQIPFAMQMAYRFNGIGVTQNVLYENQKLIANQFNSAIGKIQDSLSSTASALGKLQDVVNHNAQALNTLVKQLSSKFGAISSVLNDILSRLDPPEAEVQIDRLITGRLQSLQTYVTQQLIRAAEIRASANLAATKMSECVLGQSKRVDFCGKGYHLMSFPQSAPHGVVFLHVTYVPAQEKNFTTAPAICHDGKAHFPREGVFVSNGTHWFVTQRNFYEPQIITTDNTFVSGNCDVVIGIVNNTVYDPLQPELDSFKEELDKYFKNHTSPDVDLGDISGINASVVNIQKEIDRLNEVAKNLNESLIDLQELGKYEQYIKWPWYIWLGFIAGLIAIVMVTIMLCCMTSCCSCLKGCCSCGSCCKFDEDDSEPVLKGVKLHYT

SEQ ID NO: 237 - DNA, 3817 bp, synthetic construct
  source 1..3817: mol_type = other DNA
atgttcgtcttcctggtgctgctgcccctggtgtccagccagtgcgtgaacctgaccactaggactcagctgcctcccgcttacaccaactcattcactcgcggtgtgtactaccctgacaaggtcttccgttcttcagtgctgcactcaactcaggacctgttcctgcccttcttctccaacgtcacctggttccacgtcatctccggcaccaacggcactaagcgcttcgacaacccagtgctgcctttcaacgacggtgtctacttcgcttcaatcgagaagtccaacatcatccgtggatggatcttcggcaccactctggacagcaagactcagtctctgctgatcgtcaacaacgccaccaacgtggtcatcaaggtctgcgaattccagttctgcaacgacccattcctggaccacaagaacaacaagtcatggatggagtccgaattccgcgtctactccagcgctaacaactgcactttcgagtacgtgtcccagcctttcctgatggacctggaaggaaagcagggtaacttcaagaacctgagggagttcgtgttcaagaacatcgacggatacttcaagatctacagcaagcacaccccaatcatcgtgcgcgagcccgaggacctgcctcagggtttctctgctctggagccactggtggacctgcctatcggcatcaacatcacccgcttccagactctgctggctctgcaccgttcctacctgactccaggcgactcatcttctggatggactgctggagctgctgcttactacgtgggctacctgcagcctcgcaccttcctgctgaagtacaacgaaaacggaaccatcactgacgccgtcgactgcgctctggaccctctgtcagaaaccaagtgcactctgaagtccttcaccgtggagaagggcatctaccagacttcaaacttcagggtgcagcccaccgaatccatcgtcagattccctaacatcactaacctgtgccccttcgacgaggtcttcaacgccacccgcttcgcttccgtgtacgcctggaacaggaagagaatctcaaactgcgtcgctgactactccgtgctgtacaacctggcccctttcttcaccttcaagtgctacggcgtgtcaccaactaagctgaacgacctgtgcttcaccaacgtctacgccgactccttcgtgatcaggggagacgaggtcagacagatcgctcctggccagactggaaacatcgccgactacaactacaagctgcccgacgacttcaccggttgcgtcatcgcttggaacagcaacaagctggactctaaggtgagcggcaactacaactacctgtaccgcctgttccgtaagtcaaacctgaagccattcgagagggacatcagcactgaaatctaccaggccggaaacaagccttgcaacggtgtcgccggcttcaactgctacttccccctgaggtcctactctttcaggccaacttacggtgtgggccaccagccttacagagtggtcgtgctgagcttcgaactgctccacgctcctgctactgtgtgcggtccaaagaagtctaccaacctggtcaagaacaagtgcgtgaacttcaacttcaacggcctgaaaggaactggtgtcctgaccgagagcaacaagaagttcctgcccttccagcagttcggaagggacatcgctgacaccactgacgctgtgcgcgaccctcagaccctggaaatcctggacatcactccatgctcattcggaggtgtctccgtgatcacccctggcaccaacacttctaaccaggtcgctgtgctgtaccagggcgtcaactgcaccgaggtccctgtggccatccacgctgaccagctgacccccacttggcgcgtgtactccaccggcagcaacgtgttccagactcgtgctggttgcctgatcggcgccgagtacgtgaacaacagctacgaatgcgacatccccatcggcgctggaatctgcgcctcttaccagacccagactaagagccaccagcaggctcagtctgtggcctctcagtcaatcatcgcttacaccatgtcactgggcgctgaaaactccgtggcctactctaacaactcaatcgccatccccaccaacttcactatcagcgtgaccactgagatcctgccagtcagcatgaccaagacttctgtggactgcactatgtacatctgcggagacagcaccgaatgctctaacctgctgctgcagtacggctctttctgcacccagctgaagcgtgctctgactggaatcgccgtggagcaggacaagaacactcaggaagtcttcgctcaggtgaagcaaatctacaagaccccacctatcaagtacttcggcggattcaacttctcccagatcctgcctgacccctccaagccaagcaagcgctctttcatcgaggacctgctgttcaacaaggtcactctggccgacgctggattcatcaagcagtacggagactgcctgggtgacatcgccgctcgtgacctgatctgcgctcagaagttcaagggtctgaccgtgctgcccccactgctgactgacgaaatgatcgcccagtacactagcgccctgctggctggaaccatcacttctggttggaccttcggtgctggcgccgctctgcagatccctttcgctatgcagatggcctaccgtttcaacggaatcggtgtcacccagaacgtgctgtacgagaaccagaagctgatcgctaaccagttcaactcagccatcggaaagatccaggacagcctgagctctactgcctctgctctgggcaagctgcaggacgtcgtgaaccacaacgcccaggctctgaacaccctggtcaagcagctgtcatccaagttcggtgctatcagctctgtgctgaacgacatcttctcccgcctggaccctcccgaggccgaagtgcagatcgaccgcctgatcactggccgtctgcagtcactgcagacctacgtgactcagcagctgatcagggccgctgaaatcagagcctccgctaacctggccgctaccaagatgagcgagtgcgtcctgggtcaatctaagcgtgtggacttctgcggcaagggataccacctgatgtcattccctcagtctgctccccacggtgtggtgttcctgcacgtcacctacgtgccagcccaggagaagaacttcaccactgcccctgctatctgccacgacggcaaggctcacttccccagggaaggtgtcttcgtgagcaacggcacccactggttcgtcactcagagaaacttctacgagccacagatcatcaccactgacaacactttcgtgtctggaaactgcgacgtggtcatcggtatcgtcaacaacaccgtgtacgaccccctgcagccagagctggactcattcaaggaggaactggacaagtacttcaagaaccacacctcccctgacgtcgacctgggcgacatctcaggaatcaacgcttccgtcgtgaacatccagaaggagatcgaccgcctgaacgaagtggccaagaacctgaacgaaagcctgatcgacctgcaggagctgggcaagtacgaacagtacatcaagtggccttggtacatctggctgggtttcatcgctggcctcatcgctatcgtgatggtgaccatcatgctgtgctgcatgacttcatgctgctcctgcctgaagggctgctgcagctgcggatcttgctgcaagttcgacgaggacgactctgaacccgtcctgaagggcgtgaagctgcactacacctaattaa

SEQ ID NO: 238 - DNA, 3804 bp, synthetic construct
  source 1..3804: mol_type = other DNA
atgttcgtcttcctggtgctgctgcctctggtctccagccagtgcgtgaacctgatcaccaggactcagtcctacaccaacagcttcactagaggtgtgtactaccctgacaaggtcttccgctcttcagtgctgcactctactcaggacctgttcctgcccttcttctcaaacgtcacctggttccacgccatctccggcaccaacggcactaagagattcgacaacccagtgctgcctttcaacgacggcgtctacttcgcttctaccgagaagtcaaacatcatccgcggatggatcttcggcaccactctggactccaagactcagagcctgctgatcgtcaacaacgccaccaacgtggtcatcaaggtgtgcgaattccagttctgcaacgacccattcctggacgtgtaccagaagaacaacaagtcttggatggagtcagaattcagagtctactccagcgctaacaactgcactttcgagtacgtgtctcagcctttcctgatggacctggaaggaaaggagggtaacttcaagaacctgcgtgagttcgtcttcaagaacatcgacggttacttcaagatttactctaagcacaccccaatcaacctggagagggacctgcctcagggcttctcagctctggagccactggtggacctgcctatcggcatcaacatcaccaggttccagactctgctggctctgcacagaagctacctgactccaggagactcatcttctggatggactgctggagctgctgcttactacgtgggttacctgcagcctcgcaccttcctgctgaagtacaacgaaaacggcaccatcactgacgccgtcgactgcgctctggaccctctgtctgaaaccaagtgcactctgaagtcattcaccgtggagaagggcatctaccagacttccaacttccgcgtgcagcccaccgaaagcatcgtccgtttccctaacatcactaacctgtgccccttccacgaggtcttcaacgccaccaccttcgcttctgtgtacgcctggaaccgcaagcgtatctctaactgcgtcgccgactactcagtgatctacaacttcgctcccttcttcgccttcaagtgctacggagtgtcaccaactaagctgaacgacctgtgcttcaccaacgtctacgctgactctttcgtgatcaggggtaacgaggtctcacagatcgctccaggccagactggaaacatcgccgactacaactacaagctgcctgacgacttcaccggttgcgtcatcgcttggaactccaacaagctggacagcaagccctctggcaactacaactacctgtacaggctgttcagaaagtccaagctgaagcccttcgagcgtgacatcagcactgaaatctaccaggctggtaacaagccatgcaacggtgtcgccggctccaactgctactctcccctgcagtcctacggcttccgtccaacctacggtgtgggccaccagccttacagggtggtcgtgctgtccttcgaactcctccacgctccagctactgtgtgcggaccaaagaagagcaccaacctggtcaagaacaagtgcgtgaacttcaacttcaacggtctgaccggaactggtgtcctgaccgagtctaacaagaagttcctgcccttccagcagttcggtcgtgacatcgctgacactaccgacgccgtgagggacccccagaccctggaaatcctggacatcactccatgctctttcggaggtgtctcagtgatcactccaggaaccaacacttcaaaccaggtcgctgtgctgtaccagggtgtcaactgcaccgaagtccctgtggccatccacgctgaccagctgacccccacttggagagtgtacagcaccggctctaacgtcttccagactcgcgctggttgcctgatcggcgccgagtacgtgaacaactcttacgaatgcgacatccccatcggcgctggaatctgcgcctcataccagacccagactaagtcccaccagcaggctcagagcgtcgcctcacagtccatcatcgcttacaccatgtctctgggcgctgaaaactcagtggcctactcaaacaactccatcgccatccctaccaacttcactatctccgtgaccactgagatcctgcccgtctccatgaccaagactagcgtggactgcactatgtacatctgcggagactccaccgaatgcagcaacctgctgctgcagtacggtagcttctgcacccagctgaagcgtgctctgactggcatcgccgtggagcaggacaagaacactcaggaagtcttcgctcaggtgaagcaaatctacaagacccctcccatcaagtacttcggcggattcaacttctcccagatcctgcctgaccccagcaagccatctaagagatcattcatcgaggacctgctgttcaacaaggtcactctggccgacgctggtttcatcaagcagtacggagactgcctgggtgacatcgccgctcgcgacctgatctgcgctcagaagttcaacggcctgaccgtgctgccacctctgctgactgacgaaatgatcgcccagtacacttccgccctgctggctggaaccatcacttctggttggaccttcggtgctggtgctgctctgcagatccctttcgctatgcagatggcctacaggttcaacggaatcggtgtcacccagaacgtgctgtacgagaaccagaagctgatcgctaaccagttcaactccgccatcggcaagatccaggactccctgagctctactgccagcgctctgggaaagctgcaggacgtcgtgaaccacaacgcccaggctctgaacaccctggtcaagcagctgtcatccaagttcggagctatcagctctgtgctgaacgacatcctctcccgcctggaccctcctgaggctgaagtccagatcgacaggctgatcactggtagactgcagtctctgcagacctacgtgactcagcagctgatccgcgccgctgaaatccgtgcctcagctaacctggccgctaccaagatgtctgagtgcgtcctgggccagagcaagagggtggacttctgcggcaagggataccacctgatgtctttccctcagtcagctccccacggagtcgtgttcctgcacgtcacctacgtgccagcccaggagaagaacttcaccactgcccctgctatctgccacgacggcaaggctcacttcccccgtgaaggagtcttcgtgtccaacggcacccactggttcgtcactcagaggaacttctacgagccacagatcatcaccactgacaacactttcgtgagcggcaactgcgacgtggtcatcggtatcgtcaacaacaccgtgtacgaccccctgcagccagagctggactccttcaaggaagagctggacaagtacttcaagaaccacaccagcccagacgtcgacctgggcgacatctctggaatcaacgcttcagtcgtgaacatccagaaggagatcgaccgtctgaacgaagtggccaagaacctgaacgaatctctgatcgacctgcaggagctgggaaagtacgaacagtacatcaagtggccttggtacatctggctgggtttcatcgctggcctcatcgctatcgtgatggtgaccatcatgctgtgctgcatgacttcctgctgcagctgcctgaagggctgctgctcttgcggatcatgctgcaagttcgacgaggacgactcagaacccgtcctgaagggcgtgaagctgcactacacctaa

SEQ ID NO: 239 - DNA, 3810 bp, synthetic construct
  source 1..3810: mol_type = other DNA
atgttcgtcttcctggtgctgctgcctctggtctccagccagtgcgtgaacctgatcaccaggactcagtcctacaccaacagcttcactagaggtgtgtactaccctgacaaggtcttccgctcttcagtgctgcactctactcaggacctgttcctgcccttcttctcaaacgtcacctggttccacgccatccacgtgtccggcaccaacggcactaagagattcgacaacccagctctgcctttcaacgacggcgtctacttcgcttctaccgagaagtcaaacatcatccgcggatggatcttcggcaccactctggactccaagactcagagcctgctgatcgtcaacaacgccaccaacgtggtcatcaaggtgtgcgaattccagttctgcaacgacccattcctggacgtgtaccagaagaacaacaagtcttggatggagtcagaattcagagtctactccagcgctaacaactgcactttcgagtacgtgtctcagcctttcctgatggacctggaaggaaaggagggtaacttcaagaacctgcgtgagttcgtcttcaagaacatcgacggttacttcaagatttactctaagcacaccccaatcaacctggagagggacctgcctcagggcttctcagctctggagccactggtggacctgcctatcggcatcaacatcaccaggttccagactctgctggctctgcacagaagctacctgactccagtggactcatcttctggatggactgctggagctgctgcttactacgtgggttacctgcagcctcgcaccttcctgctgaagtacaacgaaaacggcaccatcactgacgccgtcgactgcgctctggaccctctgtctgaaaccaagtgcactctgaagtcattcaccgtggagaagggcatctaccagacttccaacttccgcgtgcagcccaccgaaagcatcgtccgtttccctaacatcactaacctgtgccccttccacgaggtcttcaacgccaccaccttcgcttctgtgtacgcctggaaccgcaagcgtatctctaactgcgtcgccgactactcagtgatctacaacttcgctcccttcttcgccttcaagtgctacggagtgtcaccaactaagctgaacgacctgtgcttcaccaacgtctacgctgactctttcgtgatcaggggtaacgaggtctcacagatcgctccaggccagactggaaacatcgccgactacaactacaagctgcctgacgacttcaccggttgcgtcatcgcttggaactccaacaagctggacagcaagccctctggcaactacaactacctgtacaggctgttcagaaagtccaagctgaagcccttcgagcgtgacatcagcactgaaatctaccaggctggtaacaagccatgcaacggtgtcgccggctccaactgctactctcccctgcagtcctacggcttccgtccaacctacggtgtgggccaccagccttacagggtggtcgtgctgtccttcgaactcctccacgctccagctactgtgtgcggaccaaagaagagcaccaacctggtcaagaacaagtgcgtgaacttcaacttcaacggtctgaccggaactggtgtcctgaccgagtctaacaagaagttcctgcccttccagcagttcggtcgtgacatcgctgacactaccgacgccgtgagggacccccagaccctggaaatcctggacatcactccatgctctttcggaggtgtctcagtgatcactccaggaaccaacacttcaaaccaggtcgctgtgctgtaccagggtgtcaactgcaccgaagtccctgtggccatccacgctgaccagctgacccccacttggagagtgtacagcaccggctctaacgtcttccagactcgcgctggttgcctgatcggcgccgagtacgtgaacaactcttacgaatgcgacatccccatcggcgctggaatctgcgcctcataccagacccagactaagtcccaccagcaggctcagagcgtcgcctcacagtccatcatcgcttacaccatgtctctgggcgctgaaaactcagtggcctactcaaacaactccatcgccatccctaccaacttcactatctccgtgaccactgagatcctgcccgtctccatgaccaagactagcgtggactgcactatgtacatctgcggagactccaccgaatgcagcaacctgctgctgcagtacggtagcttctgcacccagctgaagcgtgctctgactggcatcgccgtggagcaggacaagaacactcaggaagtcttcgctcaggtgaagcaaatctacaagacccctcccatcaagtacttcggcggattcaacttctcccagatcctgcctgaccccagcaagccatctaagagatcattcatcgaggacctgctgttcaacaaggtcactctggccgacgctggtttcatcaagcagtacggagactgcctgggtgacatcgccgctcgcgacctgatctgcgctcagaagttcaacggcctgaccgtgctgccacctctgctgactgacgaaatgatcgcccagtacacttccgccctgctggctggaaccatcacttctggttggaccttcggtgctggtgctgctctgcagatccctttcgctatgcagatggcctacaggttcaacggaatcggtgtcacccagaacgtgctgtacgagaaccagaagctgatcgctaaccagttcaactccgccatcggcaagatccaggactccctgagctctactgccagcgctctgggaaagctgcaggacgtcgtgaaccacaacgcccaggctctgaacaccctggtcaagcagctgtcatccaagttcggagctatcagctctgtgctgaacgacatcctctcccgcctggaccctcctgaggctgaagtccagatcgacaggctgatcactggtagactgcagtctctgcagacctacgtgactcagcagctgatccgcgccgctgaaatccgtgcctcagctaacctggccgctaccaagatgtctgagtgcgtcctgggccagagcaagagggtggacttctgcggcaagggataccacctgatgtctttccctcagtcagctccccacggagtcgtgttcctgcacgtcacctacgtgccagcccaggagaagaacttcaccactgcccctgctatctgccacgacggcaaggctcacttcccccgtgaaggagtcttcgtgtccaacggcacccactggttcgtcactcagaggaacttctacgagccacagatcatcaccactgacaacactttcgtgagcggcaactgcgacgtggtcatcggtatcgtcaacaacaccgtgtacgaccccctgcagccagagctggactccttcaaggaagagctggacaagtacttcaagaaccacaccagcccagacgtcgacctgggcgacatctctggaatcaacgcttcagtcgtgaacatccagaaggagatcgaccgtctgaacgaagtggccaagaacctgaacgaatctctgatcgacctgcaggagctgggaaagtacgaacagtacatcaagtggccttggtacatctggctgggtttcatcgctggcctcatcgctatcgtgatggtgaccatcatgctgtgctgcatgacttcctgctgcagctgcctgaagggctgctgctcttgcggatcatgctgcaagttcgacgaggacgactcagaacccgtcctgaagggcgtgaagctgcactacacctaa

SEQ ID NO: 240 - DNA, 3804 bp, synthetic construct
  source 1..3804: mol_type = other DNA
atgttcgtcttcctggtgctgctgcctctggtctccagccagtgcgtgaacctgatcaccaggactcagtcctacaccaacagcttcactagaggtgtgtactaccctgacaaggtcttccgctcttcagtgctgcactctactcaggacctgttcctgcccttcttctcaaacgtcacctggttccacgccatctccggcaccaacggcactaagagattcgacaacccagtgctgcctttcaacgacggcgtctacttcgcttctaccgagaagtcaaacatcatccgcggatggatcttcggcaccactctggactccaagactcagagcctgctgatcgtcaacaacgccaccaacgtggtcatcaaggtgtgcgaattccagttctgcaacgacccattcctggacgtgtaccacaagaacaacaagtcttggatggagtcagaattcagagtctactccagcgctaacaactgcactttcgagtacgtgtctcagcctttcctgatggacctggaaggaaagcagggtaacttcaagaacctgcgtgagttcgtcttcaagaacatcgacggttacttcaagatttactctaagcacaccccaatcaacctgggtagggacctgcctcagggcttctcagctctggagccactggtggacctgcctatcggcatcaacatcaccaggttccagactctgctggctctgcacagaagctacctgactccaggagactcatcttctggatggactgctggagctgctgcttactacgtgggttacctgcagcctcgcaccttcctgctgaagtacaacgaaaacggcaccatcactgacgccgtcgactgcgctctggaccctctgtctgaaaccaagtgcactctgaagtcattcaccgtggagaagggcatctaccagacttccaacttccgcgtgcagcccaccgaaagcatcgtccgtttccctaacatcactaacctgtgccccttcgacgaggtcttcaacgccaccaccttcgcttctgtgtacgcctggaaccgcaagcgtatctctaactgcgtcgccgactactcagtgctgtacaacttcgctcccttcttcgccttcaagtgctacggagtgtcaccaactaagctgaacgacctgtgcttcaccaacgtctacgctgactctttcgtgatcaggggtaacgaggtctcacagatcgctccaggccagactggaaacatcgccgactacaactacaagctgcctgacgacttcaccggttgcgtcatcgcttggaactccaacaagctggacagcaaagtgggtggcaactacaactaccgttacaggctgttcagaaagtccaacctgaagcccttcgagcgtgacatcagcactgaaatctaccaggctggtaacaagccatgcaacggtgtcgccggcgtcaactgctacttccccctgcagtcctacggcttccgtccaacctacggtgtgggccaccagccttacagggtggtcgtgctgtccttcgaactcctccacgctccagctactgtgtgcggaccaaagaagagcaccaacctggtcaagaacaagtgcgtgaacttcaacttcaacggtctgaccggaactggtgtcctgaccgagtctaacaagaagttcctgcccttccagcagttcggtcgtgacatcgctgacactaccgacgccgtgagggacccccagaccctggaaatcctggacatcactccatgctctttcggaggtgtctcagtgatcactccaggaaccaacacttcaaaccaggtcgctgtgctgtaccagggtgtcaactgcaccgaagtccctgtggccatccacgctgaccagctgacccccacttggagagtgtacagcaccggctctaacgtcttccagactcgcgctggttgcctgatcggcgccgagtacgtgaacaactcttacgaatgcgacatccccatcggcgctggaatctgcgcctcataccagacccagactaagtcccaccagcaggctcagagcgtcgcctcacagtccatcatcgcttacaccatgtctctgggcgctgaaaactcagtggcctactcaaacaactccatcgccatccctaccaacttcactatctccgtgaccactgagatcctgcccgtctccatgaccaagactagcgtggactgcactatgtacatctgcggagactccaccgaatgcagcaacctgctgctgcagtacggtagcttctgcacccagctgaagcgtgctctgactggcatcgccgtggagcaggacaagaacactcaggaagtcttcgctcaggtgaagcaaatctacaagacccctcccatcaagtacttcggcggattcaacttctcccagatcctgcctgaccccagcaagccatctaagagatcattcatcgaggacctgctgttcaacaaggtcactctggccgacgctggtttcatcaagcagtacggagactgcctgggtgacatcgccgctcgcgacctgatctgcgctcagaagttcaacggcctgaccgtgctgccacctctgctgactgacgaaatgatcgcccagtacacttccgccctgctggctggaaccatcacttctggttggaccttcggtgctggtgctgctctgcagatccctttcgctatgcagatggcctacaggttcaacggaatcggtgtcacccagaacgtgctgtacgagaaccagaagctgatcgctaaccagttcaactccgccatcggcaagatccaggactccctgagctctactgccagcgctctgggaaagctgcaggacgtcgtgaaccacaacgcccaggctctgaacaccctggtcaagcagctgtcatccaagttcggagctatcagctctgtgctgaacgacatcctctcccgcctggaccctcctgaggctgaagtccagatcgacaggctgatcactggtagactgcagtctctgcagacctacgtgactcagcagctgatccgcgccgctgaaatccgtgcctcagctaacctggccgctaccaagatgtctgagtgcgtcctgggccagagcaagagggtggacttctgcggcaagggataccacctgatgtctttccctcagtcagctccccacggagtcgtgttcctgcacgtcacctacgtgccagcccaggagaagaacttcaccactgcccctgctatctgccacgacggcaaggctcacttcccccgtgaaggagtcttcgtgtccaacggcacccactggttcgtcactcagaggaacttctacgagccacagatcatcaccactgacaacactttcgtgagcggcaactgcgacgtggtcatcggtatcgtcaacaacaccgtgtacgaccccctgcagccagagctggactccttcaaggaagagctggacaagtacttcaagaaccacaccagcccagacgtcgacctgggcgacatctctggaatcaacgcttcagtcgtgaacatccagaaggagatcgaccgtctgaacgaagtggccaagaacctgaacgaatctctgatcgacctgcaggagctgggaaagtacgaacagtacatcaagtggccttggtacatctggctgggtttcatcgctggcctcatcgctatcgtgatggtgaccatcatgctgtgctgcatgacttcctgctgcagctgcctgaagggctgctgctcttgcggatcatgctgcaagttcgacgaggacgactcagaacccgtcctgaagggcgtgaagctgcactacacctaa

SEQ ID NO: 241 - DNA, 3813 bp, synthetic construct
  source 1..3813: mol_type = other DNA
atgttcgtcttcctggtgctgctgcctctggtctccagccagtgcgtgaacctgatcaccaggactcagtcctacaccaacagcttcactagaggtgtgtactaccctgacaaggtcttccgctcttcagtgctgcactctactcaggacctgttcctgcccttcttctcaaacgtcacctggttccacgccatccacgtgtccggcaccaacggcactaagagattcgacaacccagtgctgcctttcaacgacggcgtctacttcgcttctaccgagaagtcaaacatcatccgcggatggatcttcggcaccactctggactccaagactcagagcctgctgatcgtcaacaacgccaccaacgtggtcatcaaggtgtgcgaattccagttctgcaacgacccattcctggacgtgtactaccacgagaacaacaagtctcgcatggagtcagaattgagagtctactccagcgctaacaactgcactttcgagtacgtgtctcagcctttcctgatggacctggaaggaaagcagggtaacttcaagaacctgcgtgagttcgtcttcaagaacatcgacggttacttcaagatttactctaagcacaccccagtgaacctgggtagggacctgcctcagggcttctcagctctggagccactggtggacctgcctatcggcatcaacatcaccaggttccagactctgctggctctgcacagaagctacctgactccaggagactcatcttctagctggactgctggagctgctgcttactacgtgggttacctgcagcctcgcaccttcctgctgaagtacaacgaaaacggcaccatcactgacgccgtcgactgcgctctggaccctctgtctgaaaccaagtgcactctgaagtcattcaccgtggagaagggcatctaccagacttccaacttccgcgtgcagcccaccgaaagcatcgtccgtttccctaacatcactaacctgtgccccttccacgaggtcttcaacgccaccaccttcgcttctgtgtacgcctggaaccgcacccgtatctctaactgcgtcgccgactactcagtgctgtacaacttcgctcccttcttcgccttcaagtgctacggagtgtcaccaactaagctgaacgacctgtgcttcaccaacgtctacgctgactctttcgtgatcaggggtaacgaggtctcacagatcgctccaggccagactggaaacatcgccgactacaactacaagctgcctgacgacttcaccggttgcgtcatcgcttggaactccaacaagctggacagcaaagtgagcggcaactacaactacttgtacaggctgttcagaaagtccaaactgaagcccttcgagcgtgacatcagcactgaaatctaccaggctggtaacaagccatgcaacggtgtcgccggctttaactgctactctcccctgcagtcctacggcttccgtccaacctacggtgtgggccaccagccttacagggtggtcgtgctgtccttcgaactcctccacgctccagctactgtgtgcggaccaaagaagagcaccaacctggtcaagaacaagtgcgtgaacttcaacttcaacggtctgaccggaactggtgtcctgaccgagtctaacaagaagttcctgcccttccagcagttcggtcgtgacatcgctgacactaccgacgccgtgagggacccccagaccctggaaatcctggacatcactccatgctctttcggaggtgtctcagtgatcactccaggaaccaacacttcaaaccaggtcgctgtgctgtaccagggtgtcaactgcaccgaagtccctgtggccatccacgctgaccagctgacccccacttggagagtgtacagcaccggctctaacgtcttccagactcgcgctggttgcctgatcggcgccgagtacgtgaacaactcttacgaatgcgacatccccatcggcgctggaatctgcgcctcataccagacccagactaagtcccaccagcaggctcagagcgtcgcctcacagtccatcatcgcttacaccatgtctctgggcgctgaaaactcagtggcctactcaaacaactccatcgccatccctaccaacttcactatctccgtgaccactgagatcctgcccgtctccatgaccaagactagcgtggactgcactatgtacatctgcggagactccaccgaatgcagcaacctgctgctgcagtacggtagcttctgcacccagctgaagcgtgctctgactggcatcgccgtggagcaggacaagaacactcaggaagtcttcgctcaggtgaagcaaatctacaagacccctcccatcaagtacttcggcggattcaacttctcccagatcctgcctgaccccagcaagccatctaagagatcattcatcgaggacctgctgttcaacaaggtcactctggccgacgctggtttcatcaagcagtacggagactgcctgggtgacatcgccgctcgcgacctgatctgcgctcagaagttcaacggcctgaccgtgctgccacctctgctgactgacgaaatgatcgcccagtacacttccgccctgctggctggaaccatcacttctggttggaccttcggtgctggtgctgctctgcagatccctttcgctatgcagatggcctacaggttcaacggaatcggtgtcacccagaacgtgctgtacgagaaccagaagctgatcgctaaccagttcaactccgccatcggcaagatccaggactccctgagctctactgccagcgctctgggaaagctgcaggacgtcgtgaaccacaacgcccaggctctgaacaccctggtcaagcagctgtcatccaagttcggagctatcagctctgtgctgaacgacatcctctcccgcctggaccctcctgaggctgaagtccagatcgacaggctgatcactggtagactgcagtctctgcagacctacgtgactcagcagctgatccgcgccgctgaaatccgtgcctcagctaacctggccgctaccaagatgtctgagtgcgtcctgggccagagcaagagggtggacttctgcggcaagggataccacctgatgtctttccctcagtcagctccccacggagtcgtgttcctgcacgtcacctacgtgccagcccaggagaagaacttcaccactgcccctgctatctgccacgacggcaaggctcacttcccccgtgaaggagtcttcgtgtccaacggcacccactggttcgtcactcagaggaacttctacgagccacagatcatcaccactgacaacactttcgtgagcggcaactgcgacgtggtcatcggtatcgtcaacaacaccgtgtacgaccccctgcagccagagctggactccttcaaggaagagctggacaagtacttcaagaaccacaccagcccagacgtcgacctgggcgacatctctggaatcaacgcttcagtcgtgaacatccagaaggagatcgaccgtctgaacgaagtggccaagaacctgaacgaatctctgatcgacctgcaggagctgggaaagtacgaacagtacatcaagtggccttggtacatctggctgggtttcatcgctggcctcatcgctatcgtgatggtgaccatcatgctgtgctgcatgacttcctgctgcagctgcctgaagggctgctgctcttgcggatcatgctgcaagttcgacgaggacgactcagaacccgtcctgaagggcgtgaagctgcactacacctaa

SEQ ID NO: 242 - protein, 1270 aa, synthetic construct; identical to SEQ ID NO: 160

SEQ ID NO: 243 - protein, 1270 aa, synthetic construct; identical to SEQ ID NO: 160

SEQ ID NO: 244 - protein, 1270 aa, synthetic construct; identical to SEQ ID NO: 205

SEQ ID NO: 245 - protein, 1269 aa, synthetic construct
MFVFLVLLPLVSSQCVNLITRTQSYTNSFTRGVYYPDKVFRSSVLHSTQDLFLPFFSNVTWFHAIHVSGTNGTKRFDNPALPFNDGVYFASTEKSNIIRGWIFGTTLDSKTQSLLIVNNATNVVIKVCEFQFCNDPFLDVYQKNNKSWMESEFRVYSSANNCTFEYVSQPFLMDLVGKEGNFKNLREFVFKNIDGYFKIYSKHTPINLERDLPQGFSALEPLVDLPIGINITRFQTLLALHRSYLTPVDSSSGWTAGAAAYYVGYLQPRTFLLKYNENGTITDAVDCALDPLSETKCTLKSFTVEKGIYQTSNFRVQPTESIVRFPNITNLCPFHEVFNATTFASVYAWNRKRISNCVADYSVIYNFAPFFAFKCYGVSPTKLNDLCFTNVYADSFVIRGNEVSQIAPGQTGNIADYNYKLPDDFTGCVIAWNSNKLDSKPSGNYNYLYRLFRKSKLKPFERDISTEIYQAGNRPCNGVAGPNCYSPLQSYGFRPTYGVGHQPYRVVVLSFELLHAPATVCGPKKSTNLVKNKCVNFNFNGLTGTGVLTESNKKFLPFQQFGRDIADTTDAVRDPQTLEILDITPCSFGGVSVITPGTNTSNQVAVLYQGVNCTEVPVAIHADQLTPTWRVYSTGSNVFQTRAGCLIGAEYVNNSYECDIPIGAGICASYQTQTKSHRRARSVASQSIIAYTMSLGAENSVAYSNNSIAIPTNFTISVTTEILPVSMTKTSVDCTMYICGDSTECSNLLLQYGSFCTQLKRALTGIAVEQDKNTQEVFAQVKQIYKTPPIKYFGGFNFSQILPDPSKPSKRSFIEDLLFNKVTLADAGFIKQYGDCLGDIAARDLICAQKFNGLTVLPPLLTDEMIAQYTSALLAGTITSGWTFGAGAALQIPFAMQMAYRFNGIGVTQNVLYENQKLIANQFNSAIGKIQDSLSSTASALGKLQDVVNHNAQALNTLVKQLSSKFGAISSVLNDILSRLDKVEAEVQIDRLITGRLQSLQTYVTQQLIRAAEIRASANLAATKMSECVLGQSKRVDFCGKGYHLMSFPQSAPHGVVFLHVTYVPAQEKNFTTAPAICHDGKAHFPREGVFVSNGTHWFVTQRNFYEPQIITTDNTFVSGNCDVVIGIVNNTVYDPLQPELDSFKEELDKYFKNHTSPDVDLGDISGINASVVNIQKEIDRLNEVAKNLNESLIDLQELGKYEQYIKWPWYIWLGFIAGLIAIVMVTIMLCCMTSCCSCLKGCCSCGSCCKFDEDDSEPVLKGVKLHYT

SEQ ID NO: 246 - protein, 1269 aa, synthetic construct
MFVFLVLLPLVSSQCVNLITRTQSYTNSFTRGVYYPDKVFRSSVLHSTQDLFLPFFSNVTWFHAIHVSGTNGTKRFDNPALPFNDGVYFASTEKSNIIRGWIFGTTLDSKTQSLLIVNNATNVVIKVCEFQFCNDPFLDVYQKNNKSWMESEFRVYSSANNCTFEYVSQPFLMDLVGKEGNFKNLREFVFKNIDGYFKIYSKHTPINLERDLPQGFSALEPLVDLPIGINITRFQTLLALHRSYLTPVDSSSGWTAGAAAYYVGYLQPRTFLLKYNENGTITDAVDCALDPLSETKCTLKSFTVEKGIYQTSNFRVQPTESIVRFPNITNLCPFHEVFNATTFASVYAWNRKRISNCVADYSVIYNFAPFFAFKCYGVSPTKLNDLCFTNVYADSFVIRGNEVSQIAPGQTGNIADYNYKLPDDFTGCVIAWNSNKLDSKPSGNYNYLYRLFRKSKLKPFERDISTEIYQAGNRPCNGVAGPNCYSPLQSYGFRPTYGVGHQPYRVVVLSFELLHASATVCGPKKSTNLVKNKCVNFNFNGLTGTGVLTESNKKFLPFQQFGRDIADTTDAVRDPQTLEILDITPCSFGGVSVITPGTNTSNQVAVLYQGVNCTEVPVAIHADQLTPTWRVYSTGSNVFQTRAGCLIGAEYVNNSYECDIPIGAGICASYQTQTKSHRRARSVASQSIIAYTMSLGAENSVAYSNNSIAIPTNFTISVTTEILPVSMTKTSVDCTMYICGDSTECSNLLLQYGSFCTQLKRALTGIAVEQDKNTQEVFAQVKQIYKTPPIKYFGGFNFSQILPDPSKPSKRSFIEDLLFNKVTLADAGFIKQYGDCLGDIAARDLICAQKFNGLTVLPPLLTDEMIAQYTSALLAGTITSGWTFGAGAALQIPFAMQMAYRFNGIGVTQNVLYENQKLIANQFNSAIGKIQDSLSSTASALGKLQDVVNHNAQALNTLVKQLSSKFGAISSVLNDILSRLDKVEAEVQIDRLITGRLQSLQTYVTQQLIRAAEIRASANLAATKMSECVLGQSKRVDFCGKGYHLMSFPQSAPHGVVFLHVTYVPAQEKNFTTAPAICHDGKAHFPREGVFVSNGTHWFVTQRNFYEPQIITTDNTFVSGNCDVVIGIVNNTVYDPLQPELDSFKEELDKYFKNHTSPDVDLGDISGINASVVNIQKEIDRLNEVAKNLNESLIDLQELGKYEQYIKWPWYIWLGFIAGLIAIVMVTIMLCCMTSCCSCLKGCCSCGSCCKFDEDDSEPVLKGVKLHYT

SEQ ID NO: 247 - protein, 1269 aa, synthetic construct
MFVFLVLLPLVSSQCVNLITRTQSYTNSFTRGVYYPDKVFRSSVLHSTQDLFLPFFSNVTWFHAIHVSGTNGTKRFDNPALPFNDGVYFASTEKSNIIRGWIFGTTLDSKTQSLLIVNNATNVVIKVCEFQFCNDPFLDVYQKNNKSWMESEFRVYSSANNCTFEYVSQPFLMDLVGKEGNFKNLREFVFKNIDGYFKIYSKHTPINLERDLPQGFSALEPLVDLPIGINITRFQTLLALHRSYLTPVDSSSGWTAGAAAYYVGYLQPRTFLLKYNENGTITDAVDCALDPLSETKCTLKSFTVEKGIYQTSNFRVQPTESIVRFPNITNLCPFHEVFNATTFASVYAWNRKRISNCVADYSVIYNFAPFFAFKCYGVSPTKLNDLCFTNVYADSFVIRGNEVSQIAPGQTGNIADYNYKLPDDFTGCVIAWNSNKLDSTPSGNYNYLYRLFRKSKLKPFERDISTEIYQAGNRPCNGVAGPNCYSPLQSYGFRPTYGVGHQPYRVVVLSFELLHAPATVCGPKKSTNLVKNKCVNFNFNGLTGTGVLTESNKKFLPFQQFGRDIADTTDAVRDPQTLEILDITPCSFGGVSVITPGTNTSNQVAVLYQGVNCTEVPVAIHADQLTPTWRVYSTGSNVFQTRAGCLIGAEYVNNSYECDIPIGAGICASYQTQTKSHRRARSVASQSIIAYTMSLGAENSVAYSNNSIAIPTNFTISVTTEILPVSMTKTSVDCTMYICGDSTECSNLLLQYGSFCTQLKRALTGIAVEQDKNTQEVFAQVKQIYKTPPIKYFGGFNFSQILPDPSKPSKRSFIEDLLFNKVTLADAGFIKQYGDCLGDIAARDLICAQKFNGLTVLPPLLTDEMIAQYTSALLAGTITSGWTFGAGAALQIPFAMQMAYRFNGIGVTQNVLYENQKLIANQFNSAIGKIQDSLSSTASALGKLQDVVNHNAQALNTLVKQLSSKFGAISSVLNDILSRLDKVEAEVQIDRLITGRLQSLQTYVTQQLIRAAEIRASANLAATKMSECVLGQSKRVDFCGKGYHLMSFPQSAPHGVVFLHVTYVPAQEKNFTTAPAICHDGKAHFPREGVFVSNGTHWFVTQRNFYEPQIITTDNTFVSGNCDVVIGIVNNTVYDPLQPELDSFKEELDKYFKNHTSPDVDLGDISGINASVVNIQKEIDRLNEVAKNLNESLIDLQELGKYEQYIKWPWYIWLGFIAGLIAIVMVTIMLCCMTSCCSCLKGCCSCGSCCKFDEDDSEPVLKGVKLHYT

SEQ ID NO: 248 - protein, 1269 aa, synthetic construct
MFVFLVLLPLVSSQCVNLITRTQSYTNSFTRGVYYPDKVFRSSVLHSTQDLFLPFFSNVTWFHAIHVSGTNGTKRFDNPALPFNDGVYFASTEKSNIIRGWIFGTTLDSKTQSLLIVNNATNVVIKVCEFQFCNDPFLDVYQKNNKSWMESEFRVYSSANNCTFEYVSQPFLMDLVGKEGNFKNLREFVFKNIDGYFKIYSKHTPINLERDLPQGFSALEPLVDLPIGINITRFQTLLALHRSYLTPVDSSSGWTAGAAAYYVGYLQPRTFLLKYNENGTITDAVDCALDPLSETKCTLKSFTVEKGIYQTSNFRVQPTESIVRFPNITNLCPFHEVFNATTFASVYAWNRKRISNCVADYSVIYNFAPFFAFKCYGVSPTKLNDLCFTNVYADSFVIRGNEVSQIAPGQTGNIADYNYKLPDDFTGCVIAWNSNKLDSKPSGNYNYLYRLFRKSKLKPFERDISTEIYQAGNRPCNGVAGSNCYSPLQSYGFRPTYGVGHQPYRVVVLSFELLHAPATVCGPKKSTNLVKNKCVNFNFNGLTGTGVLTESNKKFLPFQQFGRDIADTTDAVRDPQTLEILDITPCSFGGVSVITPGTNTSNQVAVLYQGVNCTEVPVAIHADQLTPTWRVYSTGSNVFQTRAGCLIGAEYVNNSYECDIPIGAGICASYQTQTKSHRRARSVASQSIIAYTMSLGAENSVAYSNNSIAIPTNFTISVTTEILPVSMTKTSVDCTMYICGDSTECSNLLLQYGSFCTQLKRALTGIAVEQDKNTQEVFAQVKQIYKTPPIKYFGGFNFSQILPDPSKPSKRSFIEDLLFNKVTLADAGFIKQYGDCLGDIAARDLICAQKFNGLTVLPPLLTDEMIAQYTSALLAGTITSGWTFGAGAALQIPFAMQMAYRFNGIGVTQNVLYENQKLIANQFNSAIGKIQDSLSSTASALGKLQDVVNHNAQALNTLVKQLSSKFGAISSVLNDILSRLDKVEAEVQIDRLITGRLQSLQTYVTQQLIRAAEIRASANLAATKMSECVLGQSKRVDFCGKGYHLMSFPQSAPHGVVFLHVTYVPAQEKNFTTAPAICHDGKAHFPREGVFVSNGTHWFVTQRNFYEPQIITTDNTFVSGNCDVVIGIVNNTVYDPLQPELDSFKEELDKYFKNHTSPDVDLGDISGINASVVNIQKEIDRLNEVAKNLNESLIDLQELGKYEQYIKWPWYIWLGFIAGLIAIVMVTIMLCCMTSCCSCLKGCCSCGSCCKFDEDDSEPVLKGVKLHYT

SEQ ID NO: 249 - protein, 1269 aa, synthetic construct
MFVFLVLLPLVSSQCVNLITRTQSYTNSFTRGVYYPDKVFRSSVLHSTQDLFLPFFSNVTWFHAIHVSGTNGTKRFDNPALPFNDGVYFASTEKSNIIRGWIFGTTLDSKTQSLLIVNNATNVVIKVCEFQFCNDPFLDVYQKNNKSWMESEFRVYSSANNCTFEYVSQPFLMDLVGKEGNFKNLREFVFKNIDGYFKIYSKHTPINLERDLPQGFSALEPLVDLPIGINITRFQTLLALHRSYLTPVDSSSGWTAGAAAYYVGYLQPRTFLLKYNENGTITDAVDCALDPLSETKCTLKSFTVEKGIYQTSNFRVQPTESIVRFPNITNLCPFHEVFNATTFASVYAWNRKRISNCVADYSVIYNFAPFFAFKCYGVSPTKLNDLCFTNVYADSFVIRGNEVSQIAPGQTGNIADYNYKLPDDFTGCVIAWNSNKLDSKPSGNYNYLYRLFRKSKLKPFERDISTEIYQAGNKPCNGVAGPNCYSPLQSYGFRPTYGVGHQPYRVVVLSFELLHAPATVCGPKKSTNLVKNKCVNFNFNGLTGTGVLTESNKKFLPFQQFGRDIADTTDAVRDPQTLEILDITPCSFGGVSVITPGTNTSNQVAVLYQGVNCTEVPVAIHADQLTPTWRVYSTGSNVFQTRAGCLIGAEYVNNSYECDIPIGAGICASYQTQTKSHRRARSVASQSIIAYTMSLGAENSVAYSNNSIAIPTNFTISVTTEILPVSMTKTSVDCTMYICGDSTECSNLLLQYGSFCTQLKRALTGIAVEQDKNTQEVFAQVKQIYKTPPIKYFGGFNFSQILPDPSKPSKRSFIEDLLFNKVTLADAGFIKQYGDCLGDIAARDLICAQKFNGLTVLPPLLTDEMIAQYTSALLAGTITSGWTFGAGAALQIPFAMQMAYRFNGIGVTQNVLYENQKLIANQFNSAIGKIQDSLSSTASALGKLQDVVNHNAQALNTLVKQLSSKFGAISSVLNDILSRLDKVEAEVQIDRLITGRLQSLQTYVTQQLIRAAEIRASANLAATKMSECVLGQSKRVDFCGKGYHLMSFPQSAPHGVVFLHVTYVPAQEKNFTTAPAICHDGKAHFPREGVFVSNGTHWFVTQRNFYEPQIITTDNTFVSGNCDVVIGIVNNTVYDPLQPELDSFKEELDKYFKNHTSPDVDLGDISGINASVVNIQKEIDRLNEVAKNLNESLIDLQELGKYEQYIKWPWYIWLGFIAGLIAIVMVTIMLCCMTSCCSCLKGCCSCGSCCKFDEDDSEPVLKGVKLHYT

SEQ ID NO: 250 - protein, 1269 aa, synthetic construct
MFVFLVLLPLVSSQCVNLITRTQSYTNSFTRGVYYPDKVFRSSVLHSTQDLFLPFFSNVTWFHAIHVSGTNGTKRFDNPALPFNDGVYFASTEKSNIIRGWIFGTTLDSKTQSLLIVNNATNVVIKVCEFQFCNDPFLDVYQKNNKSWMESEFRVYSSANNCTFEYVSQPFLMDLVGKEGNFKNLREFVFKNIDGYFKIYSKHTPINLERDLPQGFSALEPLVDLPIGINITRFQTLLALHRSYLTPVDSSSGWTAGAAAYYVGYLQPRTFLLKYNENGTITDAVDCALDPLSETKCTLKSFTVEKGIYQTSNFRVQPTESIVRFPNITNLCPFHEVFNATTFASVYAWNRKRISNCVADYSVIYNFAPFFAFKCYGVSPTKLNDLCFTNVYADSFVIRGNEVSQIAPGQTGNIADYNYKLPDDFTGCVIAWNSNKLDSKPSGNYNYLYRLFRKSKLKPFERDISTEIYQAGNRPCNGVAGPNCYSPLQSYGFRPTYGVGHQPYRVVVLSFELLHAPATVCGPKKSTNLVKNKCVNFNFNGLTGTGVLTESNKKFLPFQQFGRDIADTTDAVRDPQTLEILDITPCSFGGVSVITPGTNTSNQVAVLYQGVNCTEVPVAIHADQLTPTWRVYSTGSNVFQTRAGCLIGAEYVNNSYECDIPIGAGICASYQTQTKSHQQAQSVASQSIIAYTMSLGAENSVAYSNNSIAIPTNFTISVTTEILPVSMTKTSVDCTMYICGDSTECSNLLLQYGSFCTQLKRALTGIAVEQDKNTQEVFAQVKQIYKTPPIKYFGGFNFSQILPDPSKPSKRSFIEDLLFNKVTLADAGFIKQYGDCLGDIAARDLICAQKFNGLTVLPPLLTDEMIAQYTSALLAGTITSGWTFGAGAALQIPFAMQMAYRFNGIGVTQNVLYENQKLIANQFNSAIGKIQDSLSSTASALGKLQDVVNHNAQALNTLVKQLSSKFGAISSVLNDILSRLDPPEAEVQIDRLITGRLQSLQTYVTQQLIRAAEIRASANLAATKMSECVLGQSKRVDFCGKGYHLMSFPQSAPHGVVFLHVTYVPAQEKNFTTAPAICHDGKAHFPREGVFVSNGTHWFVTQRNFYEPQIITTDNTFVSGNCDVVIGIVNNTVYDPLQPELDSFKEELDKYFKNHTSPDVDLGDISGINASVVNIQKEIDRLNEVAKNLNESLIDLQELGKYEQYIKWPWYIWLGFIAGLIAIVMVTIMLCCMTSCCSCLKGCCSCGSCCKFDEDDSEPVLKGVKLHYT

SEQ ID NO: 251 - protein, 1269 aa, synthetic construct
MFVFLVLLPLVSSQCVNLITRTQSYTNSFTRGVYYPDKVFRSSVLHSTQDLFLPFFSNVTWFHAIHVSGTNGTKRFDNPALPFNDGVYFASTEKSNIIRGWIFGTTLDSKTQSLLIVNNATNVVIKVCEFQFCNDPFLDVYQKNNKSWMESEFRVYSSANNCTFEYVSQPFLMDLVGKEGNFKNLREFVFKNIDGYFKIYSKHTPINLERDLPQGFSALEPLVDLPIGINITRFQTLLALHRSYLTPVDSSSGWTAGAAAYYVGYLQPRTFLLKYNENGTITDAVDCALDPLSETKCTLKSFTVEKGIYQTSNFRVQPTESIVRFPNITNLCPFHEVFNATTFASVYAWNRKRISNCVADYSVIYNFAPFFAFKCYGVSPTKLNDLCFTNVYADSFVIRGNEVSQIAPGQTGNIADYNYKLPDDFTGCVIAWNSNKLDSKPSGNYNYLYRLFRKSKLKPFERDISTEIYQAGNRPCNGVAGPNCYSPLQSYGFRPTYGVGHQPYRVVVLSFELLHASATVCGPKKSTNLVKNKCVNFNFNGLTGTGVLTESNKKFLPFQQFGRDIADTTDAVRDPQTLEILDITPCSFGGVSVITPGTNTSNQVAVLYQGVNCTEVPVAIHADQLTPTWRVYSTGSNVFQTRAGCLIGAEYVNNSYECDIPIGAGICASYQTQTKSHQQAQSVASQSIIAYTMSLGAENSVAYSNNSIAIPTNFTISVTTEILPVSMTKTSVDCTMYICGDSTECSNLLLQYGSFCTQLKRALTGIAVEQDKNTQEVFAQVKQIYKTPPIKYFGGFNFSQILPDPSKPSKRSFIEDLLFNKVTLADAGFIKQYGDCLGDIAARDLICAQKFNGLTVLPPLLTDEMIAQYTSALLAGTITSGWTFGAGAALQIPFAMQMAYRFNGIGVTQNVLYENQKLIANQFNSAIGKIQDSLSSTASALGKLQDVVNHNAQALNTLVKQLSSKFGAISSVLNDILSRLDPPEAEVQIDRLITGRLQSLQTYVTQQLIRAAEIRASANLAATKMSECVLGQSKRVDFCGKGYHLMSFPQSAPHGVVFLHVTYVPAQEKNFTTAPAICHDGKAHFPREGVFVSNGTHWFVTQRNFYEPQIITTDNTFVSGNCDVVIGIVNNTVYDPLQPELDSFKEELDKYFKNHTSPDVDLGDISGINASVVNIQKEIDRLNEVAKNLNESLIDLQELGKYEQYIKWPWYIWLGFIAGLIAIVMVTIMLCCMTSCCSCLKGCCSCGSCCKFDEDDSEPVLKGVKLHYT

SEQ ID NO: 252 - protein, 1269 aa, synthetic construct
MFVFLVLLPLVSSQCVNLITRTQSYTNSFTRGVYYPDKVFRSSVLHSTQDLFLPFFSNVTWFHAIHVSGTNGTKRFDNPALPFNDGVYFASTEKSNIIRGWIFGTTLDSKTQSLLIVNNATNVVIKVCEFQFCNDPFLDVYQKNNKSWMESEFRVYSSANNCTFEYVSQPFLMDLVGKEGNFKNLREFVFKNIDGYFKIYSKHTPINLERDLPQGFSALEPLVDLPIGINITRFQTLLALHRSYLTPVDSSSGWTAGAAAYYVGYLQPRTFLLKYNENGTITDAVDCALDPLSETKCTLKSFTVEKGIYQTSNFRVQPTESIVRFPNITNLCPFHEVFNATTFASVYAWNRKRISNCVADYSVIYNFAPFFAFKCYGVSPTKLNDLCFTNVYADSFVIRGNEVSQIAPGQTGNIADYNYKLPDDFTGCVIAWNSNKLDSTPSGNYNYLYRLFRKSKLKPFERDISTEIYQAGNRPCNGVAGPNCYSPLQSYGFRPTYGVGHQPYRVVVLSFELLHAPATVCGPKKSTNLVKNKCVNFNFNGLTGTGVLTESNKKFLPFQQFGRDIADTTDAVRDPQTLEILDITPCSFGGVSVITPGTNTSNQVAVLYQGVNCTEVPVAIHADQLTPTWRVYSTGSNVFQTRAGCLIGAEYVNNSYECDIPIGAGICASYQTQTKSHQQAQSVASQSIIAYTMSLGAENSVAYSNNSIAIPTNFTISVTTEILPVSMTKTSVDCTMYICGDSTECSNLLLQYGSFCTQLKRALTGIAVEQDKNTQEVFAQVKQIYKTPPIKYFGGFNFSQILPDPSKPSKRSFIEDLLFNKVTLADAGFIKQYGDCLGDIAARDLICAQKFNGLTVLPPLLTDEMIAQYTSALLAGTITSGWTFGAGAALQIPFAMQMAYRFNGIGVTQNVLYENQKLIANQFNSAIGKIQDSLSSTASALGKLQDVVNHNAQALNTLVKQLSSKFGAISSVLNDILSRLDPPEAEVQIDRLITGRLQSLQTYVTQQLIRAAEIRASANLAATKMSECVLGQSKRVDFCGKGYHLMSFPQSAPHGVVFLHVTYVPAQEKNFTTAPAICHDGKAHFPREGVFVSNGTHWFVTQRNFYEPQIITTDNTFVSGNCDVVIGIVNNTVYDPLQPELDSFKEELDKYFKNHTSPDVDLGDISGINASVVNIQKEIDRLNEVAKNLNESLIDLQELGKYEQYIKWPWYIWLGFIAGLIAIVMVTIMLCCMTSCCSCLKGCCSCGSCCKFDEDDSEPVLKGVKLHYT

SEQ ID NO: 253 - protein, 1269 aa, synthetic construct
MFVFLVLLPLVSSQCVNLITRTQSYTNSFTRGVYYPDKVFRSSVLHSTQDLFLPFFSNVTWFHAIHVSGTNGTKRFDNPALPFNDGVYFASTEKSNIIRGWIFGTTLDSKTQSLLIVNNATNVVIKVCEFQFCNDPFLDVYQKNNKSWMESEFRVYSSANNCTFEYVSQPFLMDLVGKEGNFKNLREFVFKNIDGYFKIYSKHTPINLERDLPQGFSALEPLVDLPIGINITRFQTLLALHRSYLTPVDSSSGWTAGAAAYYVGYLQPRTFLLKYNENGTITDAVDCALDPLSETKCTLKSFTVEKGIYQTSNFRVQPTESIVRFPNITNLCPFHEVFNATTFASVYAWNRKRISNCVADYSVIYNFAPFFAFKCYGVSPTKLNDLCFTNVYADSFVIRGNEVSQIAPGQTGNIADYNYKLPDDFTGCVIAWNSNKLDSKPSGNYNYLYRLFRKSKLKPFERDISTEIYQAGNRPCNGVAGSNCYSPLQSYGFRPTYGVGHQPYRVVVLSFELLHAPATVCGPKKSTNLVKNKCVNFNFNGLTGTGVLTESNKKFLPFQQFGRDIADTTDAVRDPQTLEILDITPCSFGGVSVITPGTNTSNQVAVLYQGVNCTEVPVAIHADQLTPTWRVYSTGSNVFQTRAGCLIGAEYVNNSYECDIPIGAGICASYQTQTKSHQQAQSVASQSIIAYTMSLGAENSVAYSNNSIAIPTNFTISVTTEILPVSMTKTSVDCTMYICGDSTECSNLLLQYGSFCTQLKRALTGIAVEQDKNTQEVFAQVKQIYKTPPIKYFGGFNFSQILPDPSKPSKRSFIEDLLFNKVTLADAGFIKQYGDCLGDIAARDLICAQKFNGLTVLPPLLTDEMIAQYTSALLAGTITSGWTFGAGAALQIPFAMQMAYRFNGIGVTQNVLYENQKLIANQFNSAIGKIQDSLSSTASALGKLQDVVNHNAQALNTLVKQLSSKFGAISSVLNDILSRLDPPEAEVQIDRLITGRLQSLQTYVTQQLIRAAEIRASANLAATKMSECVLGQSKRVDFCGKGYHLMSFPQSAPHGVVFLHVTYVPAQEKNFTTAPAICHDGKAHFPREGVFVSNGTHWFVTQRNFYEPQIITTDNTFVSGNCDVVIGIVNNTVYDPLQPELDSFKEELDKYFKNHTSPDVDLGDISGINASVVNIQKEIDRLNEVAKNLNESLIDLQELGKYEQYIKWPWYIWLGFIAGLIAIVMVTIMLCCMTSCCSCLKGCCSCGSCCKFDEDDSEPVLKGVKLHYT

SEQ ID NO: 254 - protein, 1269 aa, synthetic construct
MFVFLVLLPLVSSQCVNLITRTQSYTNSFTRGVYYPDKVFRSSVLHSTQDLFLPFFSNVTWFHAIHVSGTNGTKRFDNPALPFNDGVYFASTEKSNIIRGWIFGTTLDSKTQSLLIVNNATNVVIKVCEFQFCNDPFLDVYQKNNKSWMESEFRVYSSANNCTFEYVSQPFLMDLVGKEGNFKNLREFVFKNIDGYFKIYSKHTPINLERDLPQGFSALEPLVDLPIGINITRFQTLLALHRSYLTPVDSSSGWTAGAAAYYVGYLQPRTFLLKYNENGTITDAVDCALDPLSETKCTLKSFTVEKGIYQTSNFRVQPTESIVRFPNITNLCPFHEVFNATTFASVYAWNRKRISNCVADYSVIYNFAPFFAFKCYGVSPTKLNDLCFTNVYADSFVIRGNEVSQIAPGQTGNIADYNYKLPDDFTGCVIAWNSNKLDSKPSGNYNYLYRLFRKSKLKPFERDISTEIYQAGNKPCNGVAGPNCYSPLQSYGFRPTYGVGHQPYRVVVLSFELLHAPATVCGPKKSTNLVKNKCVNFNFNGLTGTGVLTESNKKFLPFQQFGRDIADTTDAVRDPQTLEILDITPCSFGGVSVITPGTNTSNQVAVLYQGVNCTEVPVAIHADQLTPTWRVYSTGSNVFQTRAGCLIGAEYVNNSYECDIPIGAGICASYQTQTKSHQQAQSVASQSIIAYTMSLGAENSVAYSNNSIAIPTNFTISVTTEILPVSMTKTSVDCTMYICGDSTECSNLLLQYGSFCTQLKRALTGIAVEQDKNTQEVFAQVKQIYKTPPIKYFGGFNFSQILPDPSKPSKRSFIEDLLFNKVTLADAGFIKQYGDCLGDIAARDLICAQKFNGLTVLPPLLTDEMIAQYTSALLAGTITSGWTFGAGAALQIPFAMQMAYRFNGIGVTQNVLYENQKLIANQFNSAIGKIQDSLSSTASALGKLQDVVNHNAQALNTLVKQLSSKFGAISSVLNDILSRLDPPEAEVQIDRLITGRLQSLQTYVTQQLIRAAEIRASANLAATKMSECVLGQSKRVDFCGKGYHLMSFPQSAPHGVVFLHVTYVPAQEKNFTTAPAICHDGKAHFPREGVFVSNGTHWFVTQRNFYEPQIITTDNTFVSGNCDVVIGIVNNTVYDPLQPELDSFKEELDKYFKNHTSPDVDLGDISGINASVVNIQKEIDRLNEVAKNLNESLIDLQELGKYEQYIKWPWYIWLGFIAGLIAIVMVTIMLCCMTSCCSCLKGCCSCGSCCKFDEDDSEPVLKGVKLHYT

SEQ ID NO: 255 - protein, 1256 aa, synthetic construct
QCVNLITRTQSYTNSFTRGVYYPDKVFRSSVLHSTQDLFLPFFSNVTWFHAIHVSGTNGTKRFDNPALPFNDGVYFASTEKSNIIRGWIFGTTLDSKTQSLLIVNNATNVVIKVCEFQFCNDPFLDVYQKNNKSWMESEFRVYSSANNCTFEYVSQPFLMDLVGKEGNFKNLREFVFKNIDGYFKIYSKHTPINLERDLPQGFSALEPLVDLPIGINITRFQTLLALHRSYLTPVDSSSGWTAGAAAYYVGYLQPRTFLLKYNENGTITDAVDCALDPLSETKCTLKSFTVEKGIYQTSNFRVQPTESIVRFPNITNLCPFHEVFNATTFASVYAWNRKRISNCVADYSVIYNFAPFFAFKCYGVSPTKLNDLCFTNVYADSFVIRGNEVSQIAPGQTGNIADYNYKLPDDFTGCVIAWNSNKLDSKPSGNYNYLYRLFRKSKLKPFERDISTEIYQAGNRPCNGVAGPNCYSPLQSYGFRPTYGVGHQPYRVVVLSFELLHAPATVCGPKKSTNLVKNKCVNFNFNGLTGTGVLTESNKKFLPFQQFGRDIADTTDAVRDPQTLEILDITPCSFGGVSVITPGTNTSNQVAVLYQGVNCTEVPVAIHADQLTPTWRVYSTGSNVFQTRAGCLIGAEYVNNSYECDIPIGAGICASYQTQTKSHRRARSVASQSIIAYTMSLGAENSVAYSNNSIAIPTNFTISVTTEILPVSMTKTSVDCTMYICGDSTECSNLLLQYGSFCTQLKRALTGIAVEQDKNTQEVFAQVKQIYKTPPIKYFGGFNFSQILPDPSKPSKRSFIEDLLFNKVTLADAGFIKQYGDCLGDIAARDLICAQKFNGLTVLPPLLTDEMIAQYTSALLAGTITSGWTFGAGAALQIPFAMQMAYRFNGIGVTQNVLYENQKLIANQFNSAIGKIQDSLSSTASALGKLQDVVNHNAQALNTLVKQLSSKFGAISSVLNDILSRLDKVEAEVQIDRLITGRLQSLQTYVTQQLIRAAEIRASANLAATKMSECVLGQSKRVDFCGKGYHLMSFPQSAPHGVVFLHVTYVPAQEKNFTTAPAICHDGKAHFPREGVFVSNGTHWFVTQRNFYEPQIITTDNTFVSGNCDVVIGIVNNTVYDPLQPELDSFKEELDKYFKNHTSPDVDLGDISGINASVVNIQKEIDRLNEVAKNLNESLIDLQELGKYEQYIKWPWYIWLGFIAGLIAIVMVTIMLCCMTSCCSCLKGCCSCGSCCKFDEDDSEPVLKGVKLHYT

SEQ ID NO: 256 - protein, 1256 aa, synthetic construct
QCVNLITRTQSYTNSFTRGVYYPDKVFRSSVLHSTQDLFLPFFSNVTWFHAIHVSGTNGTKRFDNPALPFNDGVYFASTEKSNIIRGWIFGTTLDSKTQSLLIVNNATNVVIKVCEFQFCNDPFLDVYQKNNKSWMESEFRVYSSANNCTFEYVSQPFLMDLVGKEGNFKNLREFVFKNIDGYFKIYSKHTPINLERDLPQGFSALEPLVDLPIGINITRFQTLLALHRSYLTPVDSSSGWTAGAAAYYVGYLQPRTFLLKYNENGTITDAVDCALDPLSETKCTLKSFTVEKGIYQTSNFRVQPTESIVRFPNITNLCPFHEVFNATTFASVYAWNRKRISNCVADYSVIYNFAPFFAFKCYGVSPTKLNDLCFTNVYADSFVIRGNEVSQIAPGQTGNIADYNYKLPDDFTGCVIAWNSNKLDSKPSGNYNYLYRLFRKSKLKPFERDISTEIYQAGNRPCNGVAGPNCYSPLQSYGFRPTYGVGHQPYRVVVLSFELLHASATVCGPKKSTNLVKNKCVNFNFNGLTGTGVLTESNKKFLPFQQFGRDIADTTDAVRDPQTLEILDITPCSFGGVSVITPGTNTSNQVAVLYQGVNCTEVPVAIHADQLTPTWRVYSTGSNVFQTRAGCLIGAEYVNNSYECDIPIGAGICASYQTQTKSHRRARSVASQSIIAYTMSLGAENSVAYSNNSIAIPTNFTISVTTEILPVSMTKTSVDCTMYICGDSTECSNLLLQYGSFCTQLKRALTGIAVEQDKNTQEVFAQVKQIYKTPPIKYFGGFNFSQILPDPSKPSKRSFIEDLLFNKVTLADAGFIKQYGDCLGDIAARDLICAQKFNGLTVLPPLLTDEMIAQYTSALLAGTITSGWTFGAGAALQIPFAMQMAYRFNGIGVTQNVLYENQKLIANQFNSAIGKIQDSLSSTASALGKLQDVVNHNAQALNTLVKQLSSKFGAISSVLNDILSRLDKVEAEVQIDRLITGRLQSLQTYVTQQLIRAAEIRASANLAATKMSECVLGQSKRVDFCGKGYHLMSFPQSAPHGVVFLHVTYVPAQEKNFTTAPAICHDGKAHFPREGVFVSNGTHWFVTQRNFYEPQIITTDNTFVSGNCDVVIGIVNNTVYDPLQPELDSFKEELDKYFKNHTSPDVDLGDISGINASVVNIQKEIDRLNEVAKNLNESLIDLQELGKYEQYIKWPWYIWLGFIAGLIAIVMVTIMLCCMTSCCSCLKGCCSCGSCCKFDEDDSEPVLKGVKLHYT

SEQ ID NO: 257 - protein, 1256 aa, synthetic construct
QCVNLITRTQSYTNSFTRGVYYPDKVFRSSVLHSTQDLFLPFFSNVTWFHAIHVSGTNGTKRFDNPALPFNDGVYFASTEKSNIIRGWIFGTTLDSKTQSLLIVNNATNVVIKVCEFQFCNDPFLDVYQKNNKSWMESEFRVYSSANNCTFEYVSQPFLMDLVGKEGNFKNLREFVFKNIDGYFKIYSKHTPINLERDLPQGFSALEPLVDLPIGINITRFQTLLALHRSYLTPVDSSSGWTAGAAAYYVGYLQPRTFLLKYNENGTITDAVDCALDPLSETKCTLKSFTVEKGIYQTSNFRVQPTESIVRFPNITNLCPFHEVFNATTFASVYAWNRKRISNCVADYSVIYNFAPFFAFKCYGVSPTKLNDLCFTNVYADSFVIRGNEVSQIAPGQTGNIADYNYKLPDDFTGCVIAWNSNKLDSTPSGNYNYLYRLFRKSKLKPFERDISTEIYQAGNRPCNGVAGPNCYSPLQSYGFRPTYGVGHQPYRVVVLSFELLHAPATVCGPKKSTNLVKNKCVNFNFNGLTGTGVLTESNKKFLPFQQFGRDIADTTDAVRDPQTLEILDITPCSFGGVSVITPGTNTSNQVAVLYQGVNCTEVPVAIHADQLTPTWRVYSTGSNVFQTRAGCLIGAEYVNNSYECDIPIGAGICASYQTQTKSHRRARSVASQSIIAYTMSLGAENSVAYSNNSIAIPTNFTISVTTEILPVSMTKTSVDCTMYICGDSTECSNLLLQYGSFCTQLKRALTGIAVEQDKNTQEVFAQVKQIYKTPPIKYFGGFNFSQILPDPSKPSKRSFIEDLLFNKVTLADAGFIKQYGDCLGDIAARDLICAQKFNGLTVLPPLLTDEMIAQYTSALLAGTITSGWTFGAGAALQIPFAMQMAYRFNGIGVTQNVLYENQKLIANQFNSAIGKIQDSLSSTASALGKLQDVVNHNAQALNTLVKQLSSKFGAISSVLNDILSRLDKVEAEVQIDRLITGRLQSLQTYVTQQLIRAAEIRASANLAATKMSECVLGQSKRVDFCGKGYHLMSFPQSAPHGVVFLHVTYVPAQEKNFTTAPAICHDGKAHFPREGVFVSNGTHWFVTQRNFYEPQIITTDNTFVSGNCDVVIGIVNNTVYDPLQPELDSFKEELDKYFKNHTSPDVDLGDISGINASVVNIQKEIDRLNEVAKNLNESLIDLQELGKYEQYIKWPWYIWLGFIAGLIAIVMVTIMLCCMTSCCSCLKGCCSCGSCCKFDEDDSEPVLKGVKLHYT

SEQ ID NO: 258 - protein, 1256 aa, synthetic construct
QCVNLITRTQSYTNSFTRGVYYPDKVFRSSVLHSTQDLFLPFFSNVTWFHAIHVSGTNGTKRFDNPALPFNDGVYFASTEKSNIIRGWIFGTTLDSKTQSLLIVNNATNVVIKVCEFQFCNDPFLDVYQKNNKSWMESEFRVYSSANNCTFEYVSQPFLMDLVGKEGNFKNLREFVFKNIDGYFKIYSKHTPINLERDLPQGFSALEPLVDLPIGINITRFQTLLALHRSYLTPVDSSSGWTAGAAAYYVGYLQPRTFLLKYNENGTITDAVDCALDPLSETKCTLKSFTVEKGIYQTSNFRVQPTESIVRFPNITNLCPFHEVFNATTFASVYAWNRKRISNCVADYSVIYNFAPFFAFKCYGVSPTKLNDLCFTNVYADSFVIRGNEVSQIAPGQTGNIADYNYKLPDDFTGCVIAWNSNKLDSKPSGNYNYLYRLFRKSKLKPFERDISTEIYQAGNRPCNGVAGSNCYSPLQSYGFRPTYGVGHQPYRVVVLSFELLHAPATVCGPKKSTNLVKNKCVNFNFNGLTGTGVLTESNKKFLPFQQFGRDIADTTDAVRDPQTLEILDITPCSFGGVSVITPGTNTSNQVAVLYQGVNCTEVPVAIHADQLTPTWRVYSTGSNVFQTRAGCLIGAEYVNNSYECDIPIGAGICASYQTQTKSHRRARSVASQSIIAYTMSLGAENSVAYSNNSIAIPTNFTISVTTEILPVSMTKTSVDCTMYICGDSTECSNLLLQYGSFCTQLKRALTGIAVEQDKNTQEVFAQVKQIYKTPPIKYFGGFNFSQILPDPSKPSKRSFIEDLLFNKVTLADAGFIKQYGDCLGDIAARDLICAQKFNGLTVLPPLLTDEMIAQYTSALLAGTITSGWTFGAGAALQIPFAMQMAYRFNGIGVTQNVLYENQKLIANQFNSAIGKIQDSLSSTASALGKLQDVVNHNAQALNTLVKQLSSKFGAISSVLNDILSRLDKVEAEVQIDRLITGRLQSLQTYVTQQLIRAAEIRASANLAATKMSECVLGQSKRVDFCGKGYHLMSFPQSAPHGVVFLHVTYVPAQEKNFTTAPAICHDGKAHFPREGVFVSNGTHWFVTQRNFYEPQIITTDNTFVSGNCDVVIGIVNNTVYDPLQPELDSFKEELDKYFKNHTSPDVDLGDISGINASVVNIQKEIDRLNEVAKNLNESLIDLQELGKYEQYIKWPWYIWLGFIAGLIAIVMVTIMLCCMTSCCSCLKGCCSCGSCCKFDEDDSEPVLKGVKLHYT

SEQ ID NO: 259 - protein, 1256 aa, synthetic construct
QCVNLITRTQSYTNSFTRGVYYPDKVFRSSVLHSTQDLFLPFFSNVTWFHAIHVSGTNGTKRFDNPALPFNDGVYFASTEKSNIIRGWIFGTTLDSKTQSLLIVNNATNVVIKVCEFQFCNDPFLDVYQKNNKSWMESEFRVYSSANNCTFEYVSQPFLMDLVGKEGNFKNLREFVFKNIDGYFKIYSKHTPINLERDLPQGFSALEPLVDLPIGINITRFQTLLALHRSYLTPVDSSSGWTAGAAAYYVGYLQPRTFLLKYNENGTITDAVDCALDPLSETKCTLKSFTVEKGIYQTSNFRVQPTESIVRFPNITNLCPFHEVFNATTFASVYAWNRKRISNCVADYSVIYNFAPFFAFKCYGVSPTKLNDLCFTNVYADSFVIRGNEVSQIAPGQTGNIADYNYKLPDDFTGCVIAWNSNKLDSKPSGNYNYLYRLFRKSKLKPFERDISTEIYQAGNKPCNGVAGPNCYSPLQSYGFRPTYGVGHQPYRVVVLSFELLHAPATVCGPKKSTNLVKNKCVNFNFNGLTGTGVLTESNKKFLPFQQFGRDIADTTDAVRDPQTLEILDITPCSFGGVSVITPGTNTSNQVAVLYQGVNCTEVPVAIHADQLTPTWRVYSTGSNVFQTRAGCLIGAEYVNNSYECDIPIGAGICASYQTQTKSHRRARSVASQSIIAYTMSLGAENSVAYSNNSIAIPTNFTISVTTEILPVSMTKTSVDCTMYICGDSTECSNLLLQYGSFCTQLKRALTGIAVEQDKNTQEVFAQVKQIYKTPPIKYFGGFNFSQILPDPSKPSKRSFIEDLLFNKVTLADAGFIKQYGDCLGDIAARDLICAQKFNGLTVLPPLLTDEMIAQYTSALLAGTITSGWTFGAGAALQIPFAMQMAYRFNGIGVTQNVLYENQKLIANQFNSAIGKIQDSLSSTASALGKLQDVVNHNAQALNTLVKQLSSKFGAISSVLNDILSRLDKVEAEVQIDRLITGRLQSLQTYVTQQLIRAAEIRASANLAATKMSECVLGQSKRVDFCGKGYHLMSFPQSAPHGVVFLHVTYVPAQEKNFTTAPAICHDGKAHFPREGVFVSNGTHWFVTQRNFYEPQIITTDNTFVSGNCDVVIGIVNNTVYDPLQPELDSFKEELDKYFKNHTSPDVDLGDISGINASVVNIQKEIDRLNEVAKNLNESLIDLQELGKYEQYIKWPWYIWLGFIAGLIAIVMVTIMLCCMTSCCSCLKGCCSCGSCCKFDEDDSEPVLKGVKLHYT

SEQ ID NO: 260 - protein, 1256 aa, synthetic construct
QCVNLITRTQSYTNSFTRGVYYPDKVFRSSVLHSTQDLFLPFFSNVTWFHAIHVSGTNGTKRFDNPALPFNDGVYFASTEKSNIIRGWIFGTTLDSKTQSLLIVNNATNVVIKVCEFQFCNDPFLDVYQKNNKSWMESEFRVYSSANNCTFEYVSQPFLMDLVGKEGNFKNLREFVFKNIDGYFKIYSKHTPINLERDLPQGFSALEPLVDLPIGINITRFQTLLALHRSYLTPVDSSSGWTAGAAAYYVGYLQPRTFLLKYNENGTITDAVDCALDPLSETKCTLKSFTVEKGIYQTSNFRVQPTESIVRFPNITNLCPFHEVFNATTFASVYAWNRKRISNCVADYSVIYNFAPFFAFKCYGVSPTKLNDLCFTNVYADSFVIRGNEVSQIAPGQTGNIADYNYKLPDDFTGCVIAWNSNKLDSKPSGNYNYLYRLFRKSKLKPFERDISTEIYQAGNRPCNGVAGPNCYSPLQSYGFRPTYGVGHQPYRVVVLSFELLHAPATVCGPKKSTNLVKNKCVNFNFNGLTGTGVLTESNKKFLPFQQFGRDIADTTDAVRDPQTLEILDITPCSFGGVSVITPGTNTSNQVAVLYQGVNCTEVPVAIHADQLTPTWRVYSTGSNVFQTRAGCLIGAEYVNNSYECDIPIGAGICASYQTQTKSHQQAQSVASQSIIAYTMSLGAENSVAYSNNSIAIPTNFTISVTTEILPVSMTKTSVDCTMYICGDSTECSNLLLQYGSFCTQLKRALTGIAVEQDKNTQEVFAQVKQIYKTPPIKYFGGFNFSQILPDPSKPSKRSFIEDLLFNKVTLADAGFIKQYGDCLGDIAARDLICAQKFNGLTVLPPLLTDEMIAQYTSALLAGTITSGWTFGAGAALQIPFAMQMAYRFNGIGVTQNVLYENQKLIANQFNSAIGKIQDSLSSTASALGKLQDVVNHNAQALNTLVKQLSSKFGAISSVLNDILSRLDPPEAEVQIDRLITGRLQSLQTYVTQQLIRAAEIRASANLAATKMSECVLGQSKRVDFCGKGYHLMSFPQSAPHGVVFLHVTYVPAQEKNFTTAPAICHDGKAHFPREGVFVSNGTHWFVTQRNFYEPQIITTDNTFVSGNCDVVIGIVNNTVYDPLQPELDSFKEELDKYFKNHTSPDVDLGDISGINASVVNIQKEIDRLNEVAKNLNESLIDLQELGKYEQYIKWPWYIWLGFIAGLIAIVMVTIMLCCMTSCCSCLKGCCSCGSCCKFDEDDSEPVLKGVKLHYT

SEQ ID NO: 261 - protein, 1256 aa, synthetic construct
QCVNLITRTQSYTNSFTRGVYYPDKVFRSSVLHSTQDLFLPFFSNVTWFHAIHVSGTNGTKRFDNPALPFNDGVYFASTEKSNIIRGWIFGTTLDSKTQSLLIVNNATNVVIKVCEFQFCNDPFLDVYQKNNKSWMESEFRVYSSANNCTFEYVSQPFLMDLVGKEGNFKNLREFVFKNIDGYFKIYSKHTPINLERDLPQGFSALEPLVDLPIGINITRFQTLLALHRSYLTPVDSSSGWTAGAAAYYVGYLQPRTFLLKYNENGTITDAVDCALDPLSETKCTLKSFTVEKGIYQTSNFRVQPTESIVRFPNITNLCPFHEVFNATTFASVYAWNRKRISNCVADYSVIYNFAPFFAFKCYGVSPTKLNDLCFTNVYADSFVIRGNEVSQIAPGQTGNIADYNYKLPDDFTGCVIAWNSNKLDSKPSGNYNYLYRLFRKSKLKPFERDISTEIYQAGNRPCNGVAGPNCYSPLQSYGFRPTYGVGHQPYRVVVLSFELLHASATVCGPKKSTNLVKNKCVNFNFNGLTGTGVLTESNKKFLPFQQFGRDIADTTDAVRDPQTLEILDITPCSFGGVSVITPGTNTSNQVAVLYQGVNCTEVPVAIHADQLTPTWRVYSTGSNVFQTRAGCLIGAEYVNNSYECDIPIGAGICASYQTQTKSHQQAQSVASQSIIAYTMSLGAENSVAYSNNSIAIPTNFTISVTTEILPVSMTKTSVDCTMYICGDSTECSNLLLQYGSFCTQLKRALTGIAVEQDKNTQEVFAQVKQIYKTPPIKYFGGFNFSQILPDPSKPSKRSFIEDLLFNKVTLADAGFIKQYGDCLGDIAARDLICAQKFNGLTVLPPLLTDEMIAQYTSALLAGTITSGWTFGAGAALQIPFAMQMAYRFNGIGVTQNVLYENQKLIANQFNSAIGKIQDSLSSTASALGKLQDVVNHNAQALNTLVKQLSSKFGAISSVLNDILSRLDPPEAEVQIDRLITGRLQSLQTYVTQQLIRAAEIRASANLAATKMSECVLGQSKRVDFCGKGYHLMSFPQSAPHGVVFLHVTYVPAQEKNFTTAPAICHDGKAHFPREGVFVSNGTHWFVTQRNFYEPQIITTDNTFVSGNCDVVIGIVNNTVYDPLQPELDSFKEELDKYFKNHTSPDVDLGDISGINASVVNIQKEIDRLNEVAKNLNESLIDLQELGKYEQYIKWPWYIWLGFIAGLIAIVMVTIMLCCMTSCCSCLKGCCSCGSCCKFDEDDSEPVLKGVKLHYT

SEQ ID NO: 262 - protein, 1256 aa, synthetic construct
QCVNLITRTQSYTNSFTRGVYYPDKVFRSSVLHSTQDLFLPFFSNVTWFHAIHVSGTNGTKRFDNPALPFNDGVYFASTEKSNIIRGWIFGTTLDSKTQSLLIVNNATNVVIKVCEFQFCNDPFLDVYQKNNKSWMESEFRVYSSANNCTFEYVSQPFLMDLVGKEGNFKNLREFVFKNIDGYFKIYSKHTPINLERDLPQGFSALEPLVDLPIGINITRFQTLLALHRSYLTPVDSSSGWTAGAAAYYVGYLQPRTFLLKYNENGTITDAVDCALDPLSETKCTLKSFTVEKGIYQTSNFRVQPTESIVRFPNITNLCPFHEVFNATTFASVYAWNRKRISNCVADYSVIYNFAPFFAFKCYGVSPTKLNDLCFTNVYADSFVIRGNEVSQIAPGQTGNIADYNYKLPDDFTGCVIAWNSNKLDSTPSGNYNYLYRLFRKSKLKPFERDISTEIYQAGNRPCNGVAGPNCYSPLQSYGFRPTYGVGHQPYRVVVLSFELLHAPATVCGPKKSTNLVKNKCVNFNFNGLTGTGVLTESNKKFLPFQQFGRDIADTTDAVRDPQTLEILDITPCSFGGVSVITPGTNTSNQVAVLYQGVNCTEVPVAIHADQLTPTWRVYSTGSNVFQTRAGCLIGAEYVNNSYECDIPIGAGICASYQTQTKSHQQAQSVASQSIIAYTMSLGAENSVAYSNNSIAIPTNFTISVTTEILPVSMTKTSVDCTMYICGDSTECSNLLLQYGSFCTQLKRALTGIAVEQDKNTQEVFAQVKQIYKTPPIKYFGGFNFSQILPDPSKPSKRSFIEDLLFNKVTLADAGFIKQYGDCLGDIAARDLICAQKFNGLTVLPPLLTDEMIAQYTSALLAGTITSGWTFGAGAALQIPFAMQMAYRFNGIGVTQNVLYENQKLIANQFNSAIGKIQDSLSSTASALGKLQDVVNHNAQALNTLVKQLSSKFGAISSVLNDILSRLDPPEAEVQIDRLITGRLQSLQTYVTQQLIRAAEIRASANLAATKMSECVLGQSKRVDFCGKGYHLMSFPQSAPHGVVFLHVTYVPAQEKNFTTAPAICHDGKAHFPREGVFVSNGTHWFVTQRNFYEPQIITTDNTFVSGNCDVVIGIVNNTVYDPLQPELDSFKEELDKYFKNHTSPDVDLGDISGINASVVNIQKEIDRLNEVAKNLNESLIDLQELGKYEQYIKWPWYIWLGFIAGLIAIVMVTIMLCCMTSCCSCLKGCCSCGSCCKFDEDDSEPVLKGVKLHYT

SEQ ID NO: 263 - protein, 1256 aa, synthetic construct
QCVNLITRTQSYTNSFTRGVYYPDKVFRSSVLHSTQDLFLPFFSNVTWFHAIHVSGTNGTKRFDNPALPFNDGVYFASTEKSNIIRGWIFGTTLDSKTQSLLIVNNATNVVIKVCEFQFCNDPFLDVYQKNNKSWMESEFRVYSSANNCTFEYVSQPFLMDLVGKEGNFKNLREFVFKNIDGYFKIYSKHTPINLERDLPQGFSALEPLVDLPIGINITRFQTLLALHRSYLTPVDSSSGWTAGAAAYYVGYLQPRTFLLKYNENGTITDAVDCALDPLSETKCTLKSFTVEKGIYQTSNFRVQPTESIVRFPNITNLCPFHEVFNATTFASVYAWNRKRISNCVADYSVIYNFAPFFAFKCYGVSPTKLNDLCFTNVYADSFVIRGNEVSQIAPGQTGNIADYNYKLPDDFTGCVIAWNSNKLDSKPSGNYNYLYRLFRKSKLKPFERDISTEIYQAGNRPCNGVAGSNCYSPLQSYGFRPTYGVGHQPYRVVVLSFELLHAPATVCGPKKSTNLVKNKCVNFNFNGLTGTGVLTESNKKFLPFQQFGRDIADTTDAVRDPQTLEILDITPCSFGGVSVITPGTNTSNQVAVLYQGVNCTEVPVAIHADQLTPTWRVYSTGSNVFQTRAGCLIGAEYVNNSYECDIPIGAGICASYQTQTKSHQQAQSVASQSIIAYTMSLGAENSVAYSNNSIAIPTNFTISVTTEILPVSMTKTSVDCTMYICGDSTECSNLLLQYGSFCTQLKRALTGIAVEQDKNTQEVFAQVKQIYKTPPIKYFGGFNFSQILPDPSKPSKRSFIEDLLFNKVTLADAGFIKQYGDCLGDIAARDLICAQKFNGLTVLPPLLTDEMIAQYTSALLAGTITSGWTFGAGAALQIPFAMQMAYRFNGIGVTQNVLYENQKLIANQFNSAIGKIQDSLSSTASALGKLQDVVNHNAQALNTLVKQLSSKFGAISSVLNDILSRLDPPEAEVQIDRLITGRLQSLQTYVTQQLIRAAEIRASANLAATKMSECVLGQSKRVDFCGKGYHLMSFPQSAPHGVVFLHVTYVPAQEKNFTTAPAICHDGKAHFPREGVFVSNGTHWFVTQRNFYEPQIITTDNTFVSGNCDVVIGIVNNTVYDPLQPELDSFKEELDKYFKNHTSPDVDLGDISGINASVVNIQKEIDRLNEVAKNLNESLIDLQELGKYEQYIKWPWYIWLGFIAGLIAIVMVTIMLCCMTSCCSCLKGCCSCGSCCKFDEDDSEPVLKGVKLHYT

SEQ ID NO: 264 - protein, 1256 aa, synthetic construct
QCVNLITRTQSYTNSFTRGVYYPDKVFRSSVLHSTQDLFLPFFSNVTWFHAIHVSGTNGTKRFDNPALPFNDGVYFASTEKSNIIRGWIFGTTLDSKTQSLLIVNNATNVVIKVCEFQFCNDPFLDVYQKNNKSWMESEFRVYSSANNCTFEYVSQPFLMDLVGKEGNFKNLREFVFKNIDGYFKIYSKHTPINLERDLPQGFSALEPLVDLPIGINITRFQTLLALHRSYLTPVDSSSGWTAGAAAYYVGYLQPRTFLLKYNENGTITDAVDCALDPLSETKCTLKSFTVEKGIYQTSNFRVQPTESIVRFPNITNLCPFHEVFNATTFASVYAWNRKRISNCVADYSVIYNFAPFFAFKCYGVSPTKLNDLCFTNVYADSFVIRGNEVSQIAPGQTGNIADYNYKLPDDFTGCVIAWNSNKLDSKPSGNYNYLYRLFRKSKLKPFERDISTEIYQAGNKPCNGVAGPNCYSPLQSYGFRPTYGVGHQPYRVVVLSFELLHAPATVCGPKKSTNLVKNKCVNFNFNGLTGTGVLTESNKKFLPFQQFGRDIADTTDAVRDPQTLEILDITPCSFGGVSVITPGTNTSNQVAVLYQGVNCTEVPVAIHADQLTPTWRVYSTGSNVFQTRAGCLIGAEYVNNSYECDIPIGAGICASYQTQTKSHQQAQSVASQSIIAYTMSLGAENSVAYSNNSIAIPTNFTISVTTEILPVSMTKTSVDCTMYICGDSTECSNLLLQYGSFCTQLKRALTGIAVEQDKNTQEVFAQVKQIYKTPPIKYFGGFNFSQILPDPSKPSKRSFIEDLLFNKVTLADAGFIKQYGDCLGDIAARDLICAQKFNGLTVLPPLLTDEMIAQYTSALLAGTITSGWTFGAGAALQIPFAMQMAYRFNGIGVTQNVLYENQKLIANQFNSAIGKIQDSLSSTASALGKLQDVVNHNAQALNTLVKQLSSKFGAISSVLNDILSRLDPPEAEVQIDRLITGRLQSLQTYVTQQLIRAAEIRASANLAATKMSECVLGQSKRVDFCGKGYHLMSFPQSAPHGVVFLHVTYVPAQEKNFTTAPAICHDGKAHFPREGVFVSNGTHWFVTQRNFYEPQIITTDNTFVSGNCDVVIGIVNNTVYDPLQPELDSFKEELDKYFKNHTSPDVDLGDISGINASVVNIQKEIDRLNEVAKNLNESLIDLQELGKYEQYIKWPWYIWLGFIAGLIAIVMVTIMLCCMTSCCSCLKGCCSCGSCCKFDEDDSEPVLKGVKLHYT

SEQ ID NO: 265 - protein, 1269 aa, synthetic construct
MFVFLVLLPLVSSQCVNLITRTQSYTNSFTRGVYYPDKVFRSSVLHSTQDLFLPFFSNVTWFHAIHVSGTNGTKRFDNPALPFNDGVYFASTEKSNIIRGWIFGTTLDSKTQSLLIVNNATNVVIKVCEFQFCNDPFLDVYQKNNKSWMESEFRVYSSANNCTFEYVSQPFLMDLEGKEGNFKNLREFVFKNIDGYFKIYSKHTPINLERDLPQGFSALEPLVDLPIGINITRFQTLLALHRSYLTPVDSSSGWTAGAAAYYVGYLQPRTFLLKYNENGTITDAVDCALDPLSETKCTLKSFTVEKGIYQTSNFRVQPTESIVRFPNITNLCPFHEVFNATTFASVYAWNRKRISNCVADYSVIYNFAPFFAFKCYGVSPTKLNDLCFTNVYADSFVIRGNEVSQIAPGQTGNIADYNYKLPDDFTGCVIAWNSNKLDSKPSGNYNYLYRLFRKSKLKPFERDISTEIYQAGNKPCNGVAGPNCYSPLQSYGFRPTYGVGHQPYRVVVLSFELLHAPATVCGPKKSTNLVKNKCVNFNFNGLTGTGVLTESNKKFLPFQQFGRDIADTTDAVRDPQTLEILDITPCSFGGVSVITPGTNTSNQVAVLYQGVNCTEVPVAIHADQLTPTWRVYSTGSNVFQTRAGCLIGAEYVNNSYECDIPIGAGICASYQTQTKSHRRARSVASQSIIAYTMSLGAENSVAYSNNSIAIPTNFTISVTTEILPVSMTKTSVDCTMYICGDSTECSNLLLQYGSFCTQLKRALTGIAVEQDKNTQEVFAQVKQIYKTPPIKYFGGFNFSQILPDPSKPSKRSFIEDLLFNKVTLADAGFIKQYGDCLGDIAARDLICAQKFNGLTVLPPLLTDEMIAQYTSALLAGTITSGWTFGAGAALQIPFAMQMAYRFNGIGVTQNVLYENQKLIANQFNSAIGKIQDSLSSTASALGKLQDVVNHNAQALNTLVKQLSSKFGAISSVLNDILSRLDKVEAEVQIDRLITGRLQSLQTYVTQQLIRAAEIRASANLAATKMSECVLGQSKRVDFCGKGYHLMSFPQSAPHGVVFLHVTYVPAQEKNFTTAPAICHDGKAHFPREGVFVSNGTHWFVTQRNFYEPQIITTDNTFVSGNCDVVIGIVNNTVYDPLQPELDSFKEELDKYFKNHTSPDVDLGDISGINASVVNIQKEIDRLNEVAKNLNESLIDLQELGKYEQYIKWPWYIWLGFIAGLIAIVMVTIMLCCMTSCCSCLKGCCSCGSCCKFDEDDSEPVLKGVKLHYT

SEQ ID NO: 266 - protein, 1269 aa, synthetic construct
MFVFLVLLPLVSSQCVNLITRTQSYTNSFTRGVYYPDKVFRSSVLHSTQDLFLPFFSNVTWFHAIHVSGTNGTKRFDNPALPFNDGVYFASTEKSNIIRGWIFGTTLDSKTQSLLIVNNATNVVIKVCEFQFCNDPFLDVYQKNNKSWMESEFRVYSSANNCTFEYVSQPFLMDLEGKEGNFKNLREFVFKNIDGYFKIYSKHTPINLERDLPQGFSALEPLVDLPIGINITRFQTLLALHRSYLTPVDSSSGWTAGAAAYYVGYLQPRTFLLKYNENGTITDAVDCALDPLSETKCTLKSFTVEKGIYQTSNFRVQPTESIVRFPNITNLCPFHEVFNATTFASVYAWNRKRISNCVADYSVIYNFAPFFAFKCYGVSPTKLNDLCFTNVYADSFVIRGNEVSQIAPGQTGNIADYNYKLPDDFTGCVIAWNSNKLDSKPSGNYNYLYRLFRKSKLKPFERDISTEIYQAGNKPCNGVAGPNCYSPLQSYGFRPTYGVGHQPYRVVVLSFELLHAPATVCGPKKSTNLVKNKCVNFNFNGLTGTGVLTESNKKFLPFQQFGRDIADTTDAVRDPQTLEILDITPCSFGGVSVITPGTNTSNQVAVLYQGVNCTEVPVAIHADQLTPTWRVYSTGSNVFQTRAGCLIGAEYVNNSYECDIPIGAGICASYQTQTKSHQQAQSVASQSIIAYTMSLGAENSVAYSNNSIAIPTNFTISVTTEILPVSMTKTSVDCTMYICGDSTECSNLLLQYGSFCTQLKRALTGIAVEQDKNTQEVFAQVKQIYKTPPIKYFGGFNFSQILPDPSKPSKRSFIEDLLFNKVTLADAGFIKQYGDCLGDIAARDLICAQKFNGLTVLPPLLTDEMIAQYTSALLAGTITSGWTFGAGAALQIPFAMQMAYRFNGIGVTQNVLYENQKLIANQFNSAIGKIQDSLSSTASALGKLQDVVNHNAQALNTLVKQLSSKFGAISSVLNDILSRLDPPEAEVQIDRLITGRLQSLQTYVTQQLIRAAEIRASANLAATKMSECVLGQSKRVDFCGKGYHLMSFPQSAPHGVVFLHVTYVPAQEKNFTTAPAICHDGKAHFPREGVFVSNGTHWFVTQRNFYEPQIITTDNTFVSGNCDVVIGIVNNTVYDPLQPELDSFKEELDKYFKNHTSPDVDLGDISGINASVVNIQKEIDRLNEVAKNLNESLIDLQELGKYEQYIKWPWYIWLGFIAGLIAIVMVTIMLCCMTSCCSCLKGCCSCGSCCKFDEDDSEPVLKGVKLHYT

SEQ ID NO: 267 - protein, 1269 aa, synthetic construct
MFVFLVLLPLVSSQCVNLITRTQSYTNSFTRGVYYPDKVFRSSVLHSTQDLFLPFFSNVTWFHAIHVSGTNGTKRFDNPALPFNDGVYFASTEKSNIIRGWIFGTTLDSKTQSLLIVNNATNVVIKVCEFQFCNDPFLDVYQKNNKSWMESEFRVYSSANNCTFEYVSQPFLMDLEGKEGNFKNLREFVFKNIDGYFKIYSKHTPINLERDLPQGFSALEPLVDLPIGINITRFQTLLALHRSYLTPVDSSSGWTAGAAAYYVGYLQPRTFLLKYNENGTITDAVDCALDPLSETKCTLKSFTVEKGIYQTSNFRVQPTESIVRFPNITNLCPFHEVFNATTFASVYAWNRKRISNCVADYSVIYNFAPFFAFKCYGVSPTKLNDLCFTNVYADSFVIRGNEVSQIAPGQTGNIADYNYKLPDDFTGCVIAWNSNKLDSKPSGNYNYLYRLFRKSKLKPFERDISTEIYQAGNKPCNGVAGPNCYSPLQSYGFRPTYGVGHQPYRVVVLSFELLHASATVCGPKKSTNLVKNKCVNFNFNGLTGTGVLTESNKKFLPFQQFGRDIADTTDAVRDPQTLEILDITPCSFGGVSVITPGTNTSNQVAVLYQGVNCTEVPVAIHADQLTPTWRVYSTGSNVFQTRAGCLIGAEYVNNSYECDIPIGAGICASYQTQTKSHRRARSVASQSIIAYTMSLGAENSVAYSNNSIAIPTNFTISVTTEILPVSMTKTSVDCTMYICGDSTECSNLLLQYGSFCTQLKRALTGIAVEQDKNTQEVFAQVKQIYKTPPIKYFGGFNFSQILPDPSKPSKRSFIEDLLFNKVTLADAGFIKQYGDCLGDIAARDLICAQKFNGLTVLPPLLTDEMIAQYTSALLAGTITSGWTFGAGAALQIPFAMQMAYRFNGIGVTQNVLYENQKLIANQFNSAIGKIQDSLSSTASALGKLQDVVNHNAQALNTLVKQLSSKFGAISSVLNDILSRLDKVEAEVQIDRLITGRLQSLQTYVTQQLIRAAEIRASANLAATKMSECVLGQSKRVDFCGKGYHLMSFPQSAPHGVVFLHVTYVPAQEKNFTTAPAICHDGKAHFPREGVFVSNGTHWFVTQRNFYEPQIITTDNTFVSGNCDVVIGIVNNTVYDPLQPELDSFKEELDKYFKNHTSPDVDLGDISGINASVVNIQKEIDRLNEVAKNLNESLIDLQELGKYEQYIKWPWYIWLGFIAGLIAIVMVTIMLCCMTSCCSCLKGCCSCGSCCKFDEDDSEPVLKGVKLHYT

SEQ ID NO: 268 - protein, 1269 aa, synthetic construct
MFVFLVLLPLVSSQCVNLITRTQSYTNSFTRGVYYPDKVFRSSVLHSTQDLFLPFFSNVTWFHAIHVSGTNGTKRFDNPALPFNDGVYFASTEKSNIIRGWIFGTTLDSKTQSLLIVNNATNVVIKVCEFQFCNDPFLDVYQKNNKSWMESEFRVYSSANNCTFEYVSQPFLMDLEGKEGNFKNLREFVFKNIDGYFKIYSKHTPINLERDLPQGFSALEPLVDLPIGINITRFQTLLALHRSYLTPVDSSSGWTAGAAAYYVGYLQPRTFLLKYNENGTITDAVDCALDPLSETKCTLKSFTVEKGIYQTSNFRVQPTESIVRFPNITNLCPFHEVFNATTFASVYAWNRKRISNCVADYSVIYNFAPFFAFKCYGVSPTKLNDLCFTNVYADSFVIRGNEVSQIAPGQTGNIADYNYKLPDDFTGCVIAWNSNKLDSKPSGNYNYLYRLFRKSKLKPFERDISTEIYQAGNKPCNGVAGPNCYSPLQSYGFRPTYGVGHQPYRVVVLSFELLHASATVCGPKKSTNLVKNKCVNFNFNGLTGTGVLTESNKKFLPFQQFGRDIADTTDAVRDPQTLEILDITPCSFGGVSVITPGTNTSNQVAVLYQGVNCTEVPVAIHADQLTPTWRVYSTGSNVFQTRAGCLIGAEYVNNSYECDIPIGAGICASYQTQTKSHQQAQSVASQSIIAYTMSLGAENSVAYSNNSIAIPTNFTISVTTEILPVSMTKTSVDCTMYICGDSTECSNLLLQYGSFCTQLKRALTGIAVEQDKNTQEVFAQVKQIYKTPPIKYFGGFNFSQILPDPSKPSKRSFIEDLLFNKVTLADAGFIKQYGDCLGDIAARDLICAQKFNGLTVLPPLLTDEMIAQYTSALLAGTITSGWTFGAGAALQIPFAMQMAYRFNGIGVTQNVLYENQKLIANQFNSAIGKIQDSLSSTASALGKLQDVVNHNAQALNTLVKQLSSKFGAISSVLNDILSRLDPPEAEVQIDRLITGRLQSLQTYVTQQLIRAAEIRASANLAATKMSECVLGQSKRVDFCGKGYHLMSFPQSAPHGVVFLHVTYVPAQEKNFTTAPAICHDGKAHFPREGVFVSNGTHWFVTQRNFYEPQIITTDNTFVSGNCDVVIGIVNNTVYDPLQPELDSFKEELDKYFKNHTSPDVDLGDISGINASVVNIQKEIDRLNEVAKNLNESLIDLQELGKYEQYIKWPWYIWLGFIAGLIAIVMVTIMLCCMTSCCSCLKGCCSCGSCCKFDEDDSEPVLKGVKLHYT

SEQ ID NO: 269 - protein, 1269 aa, synthetic construct
MFVFLVLLPLVSSQCVNLITRTQSYTNSFTRGVYYPDKVFRSSVLHSTQDLFLPFFSNVTWFHAIHVSGTNGTKRFDNPALPFNDGVYFASTEKSNIIRGWIFGTTLDSKTQSLLIVNNATNVVIKVCEFQFCNDPFLDVYQKNNKSWMESEFRVYSSANNCTFEYVSQPFLMDLEGKEGNFKNLREFVFKNIDGYFKIYSKHTPINLERDLPQGFSALEPLVDLPIGINITRFQTLLALHRSYLTPVDSSSGWTAGAAAYYVGYLQPRTFLLKYNENGTITDAVDCALDPLSETKCTLKSFTVEKGIYQTSNFRVQPTESIVRFPNITNLCPFHEVFNATTFASVYAWNRKRISNCVADYSVIYNFAPFFAFKCYGVSPTKLNDLCFTNVYADSFVIRGNEVSQIAPGQTGNIADYNYKLPDDFTGCVIAWNSNKLDSTPSGNYNYLYRLFRKSKLKPFERDISTEIYQAGNKPCNGVAGPNCYSPLQSYGFRPTYGVGHQPYRVVVLSFELLHAPATVCGPKKSTNLVKNKCVNFNFNGLTGTGVLTESNKKFLPFQQFGRDIADTTDAVRDPQTLEILDITPCSFGGVSVITPGTNTSNQVAVLYQGVNCTEVPVAIHADQLTPTWRVYSTGSNVFQTRAGCLIGAEYVNNSYECDIPIGAGICASYQTQTKSHRRARSVASQSIIAYTMSLGAENSVAYSNNSIAIPTNFTISVTTEILPVSMTKTSVDCTMYICGDSTECSNLLLQYGSFCTQLKRALTGIAVEQDKNTQEVFAQVKQIYKTPPIKYFGGFNFSQILPDPSKPSKRSFIEDLLFNKVTLADAGFIKQYGDCLGDIAARDLICAQKFNGLTVLPPLLTDEMIAQYTSALLAGTITSGWTFGAGAALQIPFAMQMAYRFNGIGVTQNVLYENQKLIANQFNSAIGKIQDSLSSTASALGKLQDVVNHNAQALNTLVKQLSSKFGAISSVLNDILSRLDKVEAEVQIDRLITGRLQSLQTYVTQQLIRAAEIRASANLAATKMSECVLGQSKRVDFCGKGYHLMSFPQSAPHGVVFLHVTYVPAQEKNFTTAPAICHDGKAHFPREGVFVSNGTHWFVTQRNFYEPQIITTDNTFVSGNCDVVIGIVNNTVYDPLQPELDSFKEELDKYFKNHTSPDVDLGDISGINASVVNIQKEIDRLNEVAKNLNESLIDLQELGKYEQYIKWPWYIWLGFIAGLIAIVMVTIMLCCMTSCCSCLKGCCSCGSCCKFDEDDSEPVLKGVKLHYT

SEQ ID NO: 270 - protein, 1269 aa, synthetic construct
MFVFLVLLPLVSSQCVNLITRTQSYTNSFTRGVYYPDKVFRSSVLHSTQDLFLPFFSNVTWFHAIHVSGTNGTKRFDNPALPFNDGVYFASTEKSNIIRGWIFGTTLDSKTQSLLIVNNATNVVIKVCEFQFCNDPFLDVYQKNNKSWMESEFRVYSSANNCTFEYVSQPFLMDLEGKEGNFKNLREFVFKNIDGYFKIYSKHTPINLERDLPQGFSALEPLVDLPIGINITRFQTLLALHRSYLTPVDSSSGWTAGAAAYYVGYLQPRTFLLKYNENGTITDAVDCALDPLSETKCTLKSFTVEKGIYQTSNFRVQPTESIVRFPNITNLCPFHEVFNATTFASVYAWNRKRISNCVADYSVIYNFAPFFAFKCYGVSPTKLNDLCFTNVYADSFVIRGNEVSQIAPGQTGNIADYNYKLPDDFTGCVIAWNSNKLDSTPSGNYNYLYRLFRKSKLKPFERDISTEIYQAGNKPCNGVAGPNCYSPLQSYGFRPTYGVGHQPYRVVVLSFELLHAPATVCGPKKSTNLVKNKCVNFNFNGLTGTGVLTESNKKFLPFQQFGRDIADTTDAVRDPQTLEILDITPCSFGGVSVITPGTNTSNQVAVLYQGVNCTEVPVAIHADQLTPTWRVYSTGSNVFQTRAGCLIGAEYVNNSYECDIPIGAGICASYQTQTKSHQQAQSVASQSIIAYTMSLGAENSVAYSNNSIAIPTNFTISVTTEILPVSMTKTSVDCTMYICGDSTECSNLLLQYGSFCTQLKRALTGIAVEQDKNTQEVFAQVKQIYKTPPIKYFGGFNFSQILPDPSKPSKRSFIEDLLFNKVTLADAGFIKQYGDCLGDIAARDLICAQKFNGLTVLPPLLTDEMIAQYTSALLAGTITSGWTFGAGAALQIPFAMQMAYRFNGIGVTQNVLYENQKLIANQFNSAIGKIQDSLSSTASALGKLQDVVNHNAQALNTLVKQLSSKFGAISSVLNDILSRLDPPEAEVQIDRLITGRLQSLQTYVTQQLIRAAEIRASANLAATKMSECVLGQSKRVDFCGKGYHLMSFPQSAPHGVVFLHVTYVPAQEKNFTTAPAICHDGKAHFPREGVFVSNGTHWFVTQRNFYEPQIITTDNTFVSGNCDVVIGIVNNTVYDPLQPELDSFKEELDKYFKNHTSPDVDLGDISGINASVVNIQKEIDRLNEVAKNLNESLIDLQELGKYEQYIKWPWYIWLGFIAGLIAIVMVTIMLCCMTSCCSCLKGCCSCGSCCKFDEDDSEPVLKGVKLHYT

SEQ ID NO: 271 - protein, 1269 aa, synthetic construct
MFVFLVLLPLVSSQCVNLITRTQSYTNSFTRGVYYPDKVFRSSVLHSTQDLFLPFFSNVTWFHAIHVSGTNGTKRFDNPALPFNDGVYFASTEKSNIIRGWIFGTTLDSKTQSLLIVNNATNVVIKVCEFQFCNDPFLDVYQKNNKSWMESEFRVYSSANNCTFEYVSQPFLMDLEGKEGNFKNLREFVFKNIDGYFKIYSKHTPINLERDLPQGFSALEPLVDLPIGINITRFQTLLALHRSYLTPVDSSSGWTAGAAAYYVGYLQPRTFLLKYNENGTITDAVDCALDPLSETKCTLKSFTVEKGIYQTSNFRVQPTESIVRFPNITNLCPFHEVFNATTFASVYAWNRKRISNCVADYSVIYNFAPFFAFKCYGVSPTKLNDLCFTNVYADSFVIRGNEVSQIAPGQTGNIADYNYKLPDDFTGCVIAWNSNKLDSKPSGNYNYLYRLFRKSKLKPFERDISTEIYQAGNKPCNGVAGSNCYSPLQSYGFRPTYGVGHQPYRVVVLSFELLHAPATVCGPKKSTNLVKNKCVNFNFNGLTGTGVLTESNKKFLPFQQFGRDIADTTDAVRDPQTLEILDITPCSFGGVSVITPGTNTSNQVAVLYQGVNCTEVPVAIHADQLTPTWRVYSTGSNVFQTRAGCLIGAEYVNNSYECDIPIGAGICASYQTQTKSHRRARSVASQSIIAYTMSLGAENSVAYSNNSIAIPTNFTISVTTEILPVSMTKTSVDCTMYICGDSTECSNLLLQYGSFCTQLKRALTGIAVEQDKNTQEVFAQVKQIYKTPPIKYFGGFNFSQILPDPSKPSKRSFIEDLLFNKVTLADAGFIKQYGDCLGDIAARDLICAQKFNGLTVLPPLLTDEMIAQYTSALLAGTITSGWTFGAGAALQIPFAMQMAYRFNGIGVTQNVLYENQKLIANQFNSAIGKIQDSLSSTASALGKLQDVVNHNAQALNTLVKQLSSKFGAISSVLNDILSRLDKVEAEVQIDRLITGRLQSLQTYVTQQLIRAAEIRASANLAATKMSECVLGQSKRVDFCGKGYHLMSFPQSAPHGVVFLHVTYVPAQEKNFTTAPAICHDGKAHFPREGVFVSNGTHWFVTQRNFYEPQIITTDNTFVSGNCDVVIGIVNNTVYDPLQPELDSFKEELDKYFKNHTSPDVDLGDISGINASVVNIQKEIDRLNEVAKNLNESLIDLQELGKYEQYIKWPWYIWLGFIAGLIAIVMVTIMLCCMTSCCSCLKGCCSCGSCCKFDEDDSEPVLKGVKLHYT

SEQ ID NO: 272 - protein, 1269 aa, synthetic construct; identical to SEQ ID NO: 230

SEQ ID NO: 273 - protein, 1256 aa, synthetic construct
QCVNLITRTQSYTNSFTRGVYYPDKVFRSSVLHSTQDLFLPFFSNVTWFHAIHVSGTNGTKRFDNPALPFNDGVYFASTEKSNIIRGWIFGTTLDSKTQSLLIVNNATNVVIKVCEFQFCNDPFLDVYQKNNKSWMESEFRVYSSANNCTFEYVSQPFLMDLEGKEGNFKNLREFVFKNIDGYFKIYSKHTPINLERDLPQGFSALEPLVDLPIGINITRFQTLLALHRSYLTPVDSSSGWTAGAAAYYVGYLQPRTFLLKYNENGTITDAVDCALDPLSETKCTLKSFTVEKGIYQTSNFRVQPTESIVRFPNITNLCPFHEVFNATTFASVYAWNRKRISNCVADYSVIYNFAPFFAFKCYGVSPTKLNDLCFTNVYADSFVIRGNEVSQIAPGQTGNIADYNYKLPDDFTGCVIAWNSNKLDSKPSGNYNYLYRLFRKSKLKPFERDISTEIYQAGNKPCNGVAGPNCYSPLQSYGFRPTYGVGHQPYRVVVLSFELLHAPATVCGPKKSTNLVKNKCVNFNFNGLTGTGVLTESNKKFLPFQQFGRDIADTTDAVRDPQTLEILDITPCSFGGVSVITPGTNTSNQVAVLYQGVNCTEVPVAIHADQLTPTWRVYSTGSNVFQTRAGCLIGAEYVNNSYECDIPIGAGICASYQTQTKSHRRARSVASQSIIAYTMSLGAENSVAYSNNSIAIPTNFTISVTTEILPVSMTKTSVDCTMYICGDSTECSNLLLQYGSFCTQLKRALTGIAVEQDKNTQEVFAQVKQIYKTPPIKYFGGFNFSQILPDPSKPSKRSFIEDLLFNKVTLADAGFIKQYGDCLGDIAARDLICAQKFNGLTVLPPLLTDEMIAQYTSALLAGTITSGWTFGAGAALQIPFAMQMAYRFNGIGVTQNVLYENQKLIANQFNSAIGKIQDSLSSTASALGKLQDVVNHNAQALNTLVKQLSSKFGAISSVLNDILSRLDKVEAEVQIDRLITGRLQSLQTYVTQQLIRAAEIRASANLAATKMSECVLGQSKRVDFCGKGYHLMSFPQSAPHGVVFLHVTYVPAQEKNFTTAPAICHDGKAHFPREGVFVSNGTHWFVTQRNFYEPQIITTDNTFVSGNCDVVIGIVNNTVYDPLQPELDSFKEELDKYFKNHTSPDVDLGDISGINASVVNIQKEIDRLNEVAKNLNESLIDLQELGKYEQYIKWPWYIWLGFIAGLIAIVMVTIMLCCMTSCCSCLKGCCSCGSCCKFDEDDSEPVLKGVKLHYT

SEQ ID NO: 274 - protein, 1256 aa, synthetic construct
QCVNLITRTQSYTNSFTRGVYYPDKVFRSSVLHSTQDLFLPFFSNVTWFHAIHVSGTNGTKRFDNPALPFNDGVYFASTEKSNIIRGWIFGTTLDSKTQSLLIVNNATNVVIKVCEFQFCNDPFLDVYQKNNKSWMESEFRVYSSANNCTFEYVSQPFLMDLEGKEGNFKNLREFVFKNIDGYFKIYSKHTPINLERDLPQGFSALEPLVDLPIGINITRFQTLLALHRSYLTPVDSSSGWTAGAAAYYVGYLQPRTFLLKYNENGTITDAVDCALDPLSETKCTLKSFTVEKGIYQTSNFRVQPTESIVRFPNITNLCPFHEVFNATTFASVYAWNRKRISNCVADYSVIYNFAPFFAFKCYGVSPTKLNDLCFTNVYADSFVIRGNEVSQIAPGQTGNIADYNYKLPDDFTGCVIAWNSNKLDSKPSGNYNYLYRLFRKSKLKPFERDISTEIYQAGNKPCNGVAGPNCYSPLQSYGFRPTYGVGHQPYRVVVLSFELLHAPATVCGPKKSTNLVKNKCVNFNFNGLTGTGVLTESNKKFLPFQQFGRDIADTTDAVRDPQTLEILDITPCSFGGVSVITPGTNTSNQVAVLYQGVNCTEVPVAIHADQLTPTWRVYSTGSNVFQTRAGCLIGAEYVNNSYECDIPIGAGICASYQTQTKSHQQAQSVASQSIIAYTMSLGAENSVAYSNNSIAIPTNFTISVTTEILPVSMTKTSVDCTMYICGDSTECSNLLLQYGSFCTQLKRALTGIAVEQDKNTQEVFAQVKQIYKTPPIKYFGGFNFSQILPDPSKPSKRSFIEDLLFNKVTLADAGFIKQYGDCLGDIAARDLICAQKFNGLTVLPPLLTDEMIAQYTSALLAGTITSGWTFGAGAALQIPFAMQMAYRFNGIGVTQNVLYENQKLIANQFNSAIGKIQDSLSSTASALGKLQDVVNHNAQALNTLVKQLSSKFGAISSVLNDILSRLDPPEAEVQIDRLITGRLQSLQTYVTQQLIRAAEIRASANLAATKMSECVLGQSKRVDFCGKGYHLMSFPQSAPHGVVFLHVTYVPAQEKNFTTAPAICHDGKAHFPREGVFVSNGTHWFVTQRNFYEPQIITTDNTFVSGNCDVVIGIVNNTVYDPLQPELDSFKEELDKYFKNHTSPDVDLGDISGINASVVNIQKEIDRLNEVAKNLNESLIDLQELGKYEQYIKWPWYIWLGFIAGLIAIVMVTIMLCCMTSCCSCLKGCCSCGSCCKFDEDDSEPVLKGVKLHYT

SEQ ID NO: 275 - protein, 1256 aa, synthetic construct
QCVNLITRTQSYTNSFTRGVYYPDKVFRSSVLHSTQDLFLPFFSNVTWFHAIHVSGTNGTKRFDNPALPFNDGVYFASTEKSNIIRGWIFGTTLDSKTQSLLIVNNATNVVIKVCEFQFCNDPFLDVYQKNNKSWMESEFRVYSSANNCTFEYVSQPFLMDLEGKEGNFKNLREFVFKNIDGYFKIYSKHTPINLERDLPQGFSALEPLVDLPIGINITRFQTLLALHRSYLTPVDSSSGWTAGAAAYYVGYLQPRTFLLKYNENGTITDAVDCALDPLSETKCTLKSFTVEKGIYQTSNFRVQPTESIVRFPNITNLCPFHEVFNATTFASVYAWNRKRISNCVADYSVIYNFAPFFAFKCYGVSPTKLNDLCFTNVYADSFVIRGNEVSQIAPGQTGNIADYNYKLPDDFTGCVIAWNSNKLDSKPSGNYNYLYRLFRKSKLKPFERDISTEIYQAGNKPCNGVAGPNCYSPLQSYGFRPTYGVGHQPYRVVVLSFELLHASATVCGPKKSTNLVKNKCVNFNFNGLTGTGVLTESNKKFLPFQQFGRDIADTTDAVRDPQTLEILDITPCSFGGVSVITPGTNTSNQVAVLYQGVNCTEVPVAIHADQLTPTWRVYSTGSNVFQTRAGCLIGAEYVNNSYECDIPIGAGICASYQTQTKSHRRARSVASQSIIAYTMSLGAENSVAYSNNSIAIPTNFTISVTTEILPVSMTKTSVDCTMYICGDSTECSNLLLQYGSFCTQLKRALTGIAVEQDKNTQEVFAQVKQIYKTPPIKYFGGFNFSQILPDPSKPSKRSFIEDLLFNKVTLADAGFIKQYGDCLGDIAARDLICAQKFNGLTVLPPLLTDEMIAQYTSALLAGTITSGWTFGAGAALQIPFAMQMAYRFNGIGVTQNVLYENQKLIANQFNSAIGKIQDSLSSTASALGKLQDVVNHNAQALNTLVKQLSSKFGAISSVLNDILSRLDKVEAEVQIDRLITGRLQSLQTYVTQQLIRAAEIRASANLAATKMSECVLGQSKRVDFCGKGYHLMSFPQSAPHGVVFLHVTYVPAQEKNFTTAPAICHDGKAHFPREGVFVSNGTHWFVTQRNFYEPQIITTDNTFVSGNCDVVIGIVNNTVYDPLQPELDSFKEELDKYFKNHTSPDVDLGDISGINASVVNIQKEIDRLNEVAKNLNESLIDLQELGKYEQYIKWPWYIWLGFIAGLIAIVMVTIMLCCMTSCCSCLKGCCSCGSCCKFDEDDSEPVLKGVKLHYT

SEQ ID NO: 276 - protein, 1256 aa, synthetic construct
QCVNLITRTQSYTNSFTRGVYYPDKVFRSSVLHSTQDLFLPFFSNVTWFHAIHVSGTNGTKRFDNPALPFNDGVYFASTEKSNIIRGWIFGTTLDSKTQSLLIVNNATNVVIKVCEFQFCNDPFLDVYQKNNKSWMESEFRVYSSANNCTFEYVSQPFLMDLEGKEGNFKNLREFVFKNIDGYFKIYSKHTPINLERDLPQGFSALEPLVDLPIGINITRFQTLLALHRSYLTPVDSSSGWTAGAAAYYVGYLQPRTFLLKYNENGTITDAVDCALDPLSETKCTLKSFTVEKGIYQTSNFRVQPTESIVRFPNITNLCPFHEVFNATTFASVYAWNRKRISNCVADYSVIYNFAPFFAFKCYGVSPTKLNDLCFTNVYADSFVIRGNEVSQIAPGQTGNIADYNYKLPDDFTGCVIAWNSNKLDSKPSGNYNYLYRLFRKSKLKPFERDISTEIYQAGNKPCNGVAGPNCYSPLQSYGFRPTYGVGHQPYRVVVLSFELLHASATVCGPKKSTNLVKNKCVNFNFNGLTGTGVLTESNKKFLPFQQFGRDIADTTDAVRDPQTLEILDITPCSFGGVSVITPGTNTSNQVAVLYQGVNCTEVPVAIHADQLTPTWRVYSTGSNVFQTRAGCLIGAEYVNNSYECDIPIGAGICASYQTQTKSHQQAQSVASQSIIAYTMSLGAENSVAYSNNSIAIPTNFTISVTTEILPVSMTKTSVDCTMYICGDSTECSNLLLQYGSFCTQLKRALTGIAVEQDKNTQEVFAQVKQIYKTPPIKYFGGFNFSQILPDPSKPSKRSFIEDLLFNKVTLADAGFIKQYGDCLGDIAARDLICAQKFNGLTVLPPLLTDEMIAQYTSALLAGTITSGWTFGAGAALQIPFAMQMAYRFNGIGVTQNVLYENQKLIANQFNSAIGKIQDSLSSTASALGKLQDVVNHNAQALNTLVKQLSSKFGAISSVLNDILSRLDPPEAEVQIDRLITGRLQSLQTYVTQQLIRAAEIRASANLAATKMSECVLGQSKRVDFCGKGYHLMSFPQSAPHGVVFLHVTYVPAQEKNFTTAPAICHDGKAHFPREGVFVSNGTHWFVTQRNFYEPQIITTDNTFVSGNCDVVIGIVNNTVYDPLQPELDSFKEELDKYFKNHTSPDVDLGDISGINASVVNIQKEIDRLNEVAKNLNESLIDLQELGKYEQYIKWPWYIWLGFIAGLIAIVMVTIMLCCMTSCCSCLKGCCSCGSCCKFDEDDSEPVLKGVKLHYT

SEQ ID NO: 277 - protein, 1256 aa, synthetic construct
QCVNLITRTQSYTNSFTRGVYYPDKVFRSSVLHSTQDLFLPFFSNVTWFHAIHVSGTNGTKRFDNPALPFNDGVYFASTEKSNIIRGWIFGTTLDSKTQSLLIVNNATNVVIKVCEFQFCNDPFLDVYQKNNKSWMESEFRVYSSANNCTFEYVSQPFLMDLEGKEGNFKNLREFVFKNIDGYFKIYSKHTPINLERDLPQGFSALEPLVDLPIGINITRFQTLLALHRSYLTPVDSSSGWTAGAAAYYVGYLQPRTFLLKYNENGTITDAVDCALDPLSETKCTLKSFTVEKGIYQTSNFRVQPTESIVRFPNITNLCPFHEVFNATTFASVYAWNRKRISNCVADYSVIYNFAPFFAFKCYGVSPTKLNDLCFTNVYADSFVIRGNEVSQIAPGQTGNIADYNYKLPDDFTGCVIAWNSNKLDSTPSGNYNYLYRLFRKSKLKPFERDISTEIYQAGNKPCNGVAGPNCYSPLQSYGFRPTYGVGHQPYRVVVLSFELLHAPATVCGPKKSTNLVKNKCVNFNFNGLTGTGVLTESNKKFLPFQQFGRDIADTTDAVRDPQTLEILDITPCSFGGVSVITPGTNTSNQVAVLYQGVNCTEVPVAIHADQLTPTWRVYSTGSNVFQTRAGCLIGAEYVNNSYECDIPIGAGICASYQTQTKSHRRARSVASQSIIAYTMSLGAENSVAYSNNSIAIPTNFTISVTTEILPVSMTKTSVDCTMYICGDSTECSNLLLQYGSFCTQLKRALTGIAVEQDKNTQEVFAQVKQIYKTPPIKYFGGFNFSQILPDPSKPSKRSFIEDLLFNKVTLADAGFIKQYGDCLGDIAARDLICAQKFNGLTVLPPLLTDEMIAQYTSALLAGTITSGWTFGAGAALQIPFAMQMAYRFNGIGVTQNVLYENQKLIANQFNSAIGKIQDSLSSTASALGKLQDVVNHNAQALNTLVKQLSSKFGAISSVLNDILSRLDKVEAEVQIDRLITGRLQSLQTYVTQQLIRAAEIRASANLAATKMSECVLGQSKRVDFCGKGYHLMSFPQSAPHGVVFLHVTYVPAQEKNFTTAPAICHDGKAHFPREGVFVSNGTHWFVTQRNFYEPQIITTDNTFVSGNCDVVIGIVNNTVYDPLQPELDSFKEELDKYFKNHTSPDVDLGDISGINASVVNIQKEIDRLNEVAKNLNESLIDLQELGKYEQYIKWPWYIWLGFIAGLIAIVMVTIMLCCMTSCCSCLKGCCSCGSCCKFDEDDSEPVLKGVKLHYT

SEQ ID NO: 278 - protein, 1256 aa, synthetic construct
QCVNLITRTQSYTNSFTRGVYYPDKVFRSSVLHSTQDLFLPFFSNVTWFHAIHVSGTNGTKRFDNPALPFNDGVYFASTEKSNIIRGWIFGTTLDSKTQSLLIVNNATNVVIKVCEFQFCNDPFLDVYQKNNKSWMESEFRVYSSANNCTFEYVSQPFLMDLEGKEGNFKNLREFVFKNIDGYFKIYSKHTPINLERDLPQGFSALEPLVDLPIGINITRFQTLLALHRSYLTPVDSSSGWTAGAAAYYVGYLQPRTFLLKYNENGTITDAVDCALDPLSETKCTLKSFTVEKGIYQTSNFRVQPTESIVRFPNITNLCPFHEVFNATTFASVYAWNRKRISNCVADYSVIYNFAPFFAFKCYGVSPTKLNDLCFTNVYADSFVIRGNEVSQIAPGQTGNIADYNYKLPDDFTGCVIAWNSNKLDSTPSGNYNYLYRLFRKSKLKPFERDISTEIYQAGNKPCNGVAGPNCYSPLQSYGFRPTYGVGHQPYRVVVLSFELLHAPATVCGPKKSTNLVKNKCVNFNFNGLTGTGVLTESNKKFLPFQQFGRDIADTTDAVRDPQTLEILDITPCSFGGVSVITPGTNTSNQVAVLYQGVNCTEVPVAIHADQLTPTWRVYSTGSNVFQTRAGCLIGAEYVNNSYECDIPIGAGICASYQTQTKSHQQAQSVASQSIIAYTMSLGAENSVAYSNNSIAIPTNFTISVTTEILPVSMTKTSVDCTMYICGDSTECSNLLLQYGSFCTQLKRALTGIAVEQDKNTQEVFAQVKQIYKTPPIKYFGGFNFSQILPDPSKPSKRSFIEDLLFNKVTLADAGFIKQYGDCLGDIAARDLICAQKFNGLTVLPPLLTDEMIAQYTSALLAGTITSGWTFGAGAALQIPFAMQMAYRFNGIGVTQNVLYENQKLIANQFNSAIGKIQDSLSSTASALGKLQDVVNHNAQALNTLVKQLSSKFGAISSVLNDILSRLDPPEAEVQIDRLITGRLQSLQTYVTQQLIRAAEIRASANLAATKMSECVLGQSKRVDFCGKGYHLMSFPQSAPHGVVFLHVTYVPAQEKNFTTAPAICHDGKAHFPREGVFVSNGTHWFVTQRNFYEPQIITTDNTFVSGNCDVVIGIVNNTVYDPLQPELDSFKEELDKYFKNHTSPDVDLGDISGINASVVNIQKEIDRLNEVAKNLNESLIDLQELGKYEQYIKWPWYIWLGFIAGLIAIVMVTIMLCCMTSCCSCLKGCCSCGSCCKFDEDDSEPVLKGVKLHYT

SEQ ID NO: 279 - protein, 1256 aa, synthetic construct
QCVNLITRTQSYTNSFTRGVYYPDKVFRSSVLHSTQDLFLPFFSNVTWFHAIHVSGTNGTKRFDNPALPFNDGVYFASTEKSNIIRGWIFGTTLDSKTQSLLIVNNATNVVIKVCEFQFCNDPFLDVYQKNNKSWMESEFRVYSSANNCTFEYVSQPFLMDLEGKEGNFKNLREFVFKNIDGYFKIYSKHTPINLERDLPQGFSALEPLVDLPIGINITRFQTLLALHRSYLTPVDSSSGWTAGAAAYYVGYLQPRTFLLKYNENGTITDAVDCALDPLSETKCTLKSFTVEKGIYQTSNFRVQPTESIVRFPNITNLCPFHEVFNATTFASVYAWNRKRISNCVADYSVIYNFAPFFAFKCYGVSPTKLNDLCFTNVYADSFVIRGNEVSQIAPGQTGNIADYNYKLPDDFTGCVIAWNSNKLDSKPSGNYNYLYRLFRKSKLKPFERDISTEIYQAGNKPCNGVAGSNCYSPLQSYGFRPTYGVGHQPYRVVVLSFELLHAPATVCGPKKSTNLVKNKCVNFNFNGLTGTGVLTESNKKFLPFQQFGRDIADTTDAVRDPQTLEILDITPCSFGGVSVITPGTNTSNQVAVLYQGVNCTEVPVAIHADQLTPTWRVYSTGSNVFQTRAGCLIGAEYVNNSYECDIPIGAGICASYQTQTKSHRRARSVASQSIIAYTMSLGAENSVAYSNNSIAIPTNFTISVTTEILPVSMTKTSVDCTMYICGDSTECSNLLLQYGSFCTQLKRALTGIAVEQDKNTQEVFAQVKQIYKTPPIKYFGGFNFSQILPDPSKPSKRSFIEDLLFNKVTLADAGFIKQYGDCLGDIAARDLICAQKFNGLTVLPPLLTDEMIAQYTSALLAGTITSGWTFGAGAALQIPFAMQMAYRFNGIGVTQNVLYENQKLIANQFNSAIGKIQDSLSSTASALGKLQDVVNHNAQALNTLVKQLSSKFGAISSVLNDILSRLDKVEAEVQIDRLITGRLQSLQTYVTQQLIRAAEIRASANLAATKMSECVLGQSKRVDFCGKGYHLMSFPQSAPHGVVFLHVTYVPAQEKNFTTAPAICHDGKAHFPREGVFVSNGTHWFVTQRNFYEPQIITTDNTFVSGNCDVVIGIVNNTVYDPLQPELDSFKEELDKYFKNHTSPDVDLGDISGINASVVNIQKEIDRLNEVAKNLNESLIDLQELGKYEQYIKWPWYIWLGFIAGLIAIVMVTIMLCCMTSCCSCLKGCCSCGSCCKFDEDDSEPVLKGVKLHYT

SEQ ID NO: 280 - protein, 1256 aa, synthetic construct; identical to SEQ ID NO: 234

SEQ ID NO: 281 - protein, 1269 aa, synthetic construct
MFVFLVLLPLVSSQCVNLITRTQSYTNSFTRGVYYPDKVFRSSVLHSTQDLFLPFFSNVTWFHAIHVSGTNGTKRFDNPALPFNDGVYFASTEKSNIIRGWIFGTTLDSKTQSLLIVNNATNVVIKVCEFQFCNDPFLDVYQKNNKSWMESEFRVYSSANNCTFEYVSQPFLMDLEGKEGNFKNLREFVFKNIDGYFKIYSKHTPINLERDLPQGFSALEPLVDLPIGINITRFQTLLALHRSYLTPGGSSSGWTAGAAAYYVGYLQPRTFLLKYNENGTITDAVDCALDPLSETKCTLKSFTVEKGIYQTSNFRVQPTESIVRFPNITNLCPFHEVFNATTFASVYAWNRKRISNCVADYSVIYNFAPFFAFKCYGVSPTKLNDLCFTNVYADSFVIRGNEVSQIAPGQTGNIADYNYKLPDDFTGCVIAWNSNKLDSKPSGNYNYLYRLFRKSKLKPFERDISTEIYQAGNKPCNGVAGPNCYSPLQSYGFRPTYGVGHQPYRVVVLSFELLHASATVCGPKKSTNLVKNKCVNFNFNGLTGTGVLTESNKKFLPFQQFGRDIADTTDAVRDPQTLEILDITPCSFGGVSVITPGTNTSNQVAVLYQGVNCTEVPVAIHADQLTPTWRVYSTGSNVFQTRAGCLIGAEYVNNSYECDIPIGAGICASYQTQTKSHRRARSVASQSIIAYTMSLGAENSVAYSNNSIAIPTNFTISVTTEILPVSMTKTSVDCTMYICGDSTECSNLLLQYGSFCTQLKRALTGIAVEQDKNTQEVFAQVKQIYKTPPIKYFGGFNFSQILPDPSKPSKRSFIEDLLFNKVTLADAGFIKQYGDCLGDIAARDLICAQKFNGLTVLPPLLTDEMIAQYTSALLAGTITSGWTFGAGAALQIPFAMQMAYRFNGIGVTQNVLYENQKLIANQFNSAIGKIQDSLSSTASALGKLQDVVNHNAQALNTLVKQLSSKFGAISSVLNDILSRLDKVEAEVQIDRLITGRLQSLQTYVTQQLIRAAEIRASANLAATKMSECVLGQSKRVDFCGKGYHLMSFPQSAPHGVVFLHVTYVPAQEKNFTTAPAICHDGKAHFPREGVFVSNGTHWFVTQRNFYEPQIITTDNTFVSGNCDVVIGIVNNTVYDPLQPELDSFKEELDKYFKNHTSPDVDLGDISGINASVVNIQKEIDRLNEVAKNLNESLIDLQELGKYEQYIKWPWYIWLGFIAGLIAIVMVTIMLCCMTSCCSCLKGCCSCGSCCKFDEDDSEPVLKGVKLHYT

SEQ ID NO: 282 - protein, 1269 aa, synthetic construct
MFVFLVLLPLVSSQCVNLITRTQSYTNSFTRGVYYPDKVFRSSVLHSTQDLFLPFFSNVTWFHAIHVSGTNGTKRFDNPALPFNDGVYFASTEKSNIIRGWIFGTTLDSKTQSLLIVNNATNVVIKVCEFQFCNDPFLDVYQKNNKSWMESEFRVYSSANNCTFEYVSQPFLMDLEGKEGNFKNLREFVFKNIDGYFKIYSKHTPINLERDLPQGFSALEPLVDLPIGINITRFQTLLALHRSYLTPGGSSSGWTAGAAAYYVGYLQPRTFLLKYNENGTITDAVDCALDPLSETKCTLKSFTVEKGIYQTSNFRVQPTESIVRFPNITNLCPFHEVFNATTFASVYAWNRKRISNCVADYSVIYNFAPFFAFKCYGVSPTKLNDLCFTNVYADSFVIRGNEVSQIAPGQTGNIADYNYKLPDDFTGCVIAWNSNKLDSKPSGNYNYLYRLFRKSKLKPFERDISTEIYQAGNKPCNGVAGPNCYSPLQSYGFRPTYGVGHQPYRVVVLSFELLHASATVCGPKKSTNLVKNKCVNFNFNGLTGTGVLTESNKKFLPFQQFGRDIADTTDAVRDPQTLEILDITPCSFGGVSVITPGTNTSNQVAVLYQGVNCTEVPVAIHADQLTPTWRVYSTGSNVFQTRAGCLIGAEYVNNSYECDIPIGAGICASYQTQTKSHQQAQSVASQSIIAYTMSLGAENSVAYSNNSIAIPTNFTISVTTEILPVSMTKTSVDCTMYICGDSTECSNLLLQYGSFCTQLKRALTGIAVEQDKNTQEVFAQVKQIYKTPPIKYFGGFNFSQILPDPSKPSKRSFIEDLLFNKVTLADAGFIKQYGDCLGDIAARDLICAQKFNGLTVLPPLLTDEMIAQYTSALLAGTITSGWTFGAGAALQIPFAMQMAYRFNGIGVTQNVLYENQKLIANQFNSAIGKIQDSLSSTASALGKLQDVVNHNAQALNTLVKQLSSKFGAISSVLNDILSRLDPPEAEVQIDRLITGRLQSLQTYVTQQLIRAAEIRASANLAATKMSECVLGQSKRVDFCGKGYHLMSFPQSAPHGVVFLHVTYVPAQEKNFTTAPAICHDGKAHFPREGVFVSNGTHWFVTQRNFYEPQIITTDNTFVSGNCDVVIGIVNNTVYDPLQPELDSFKEELDKYFKNHTSPDVDLGDISGINASVVNIQKEIDRLNEVAKNLNESLIDLQELGKYEQYIKWPWYIWLGFIAGLIAIVMVTIMLCCMTSCCSCLKGCCSCGSCCKFDEDDSEPVLKGVKLHYT

SEQ ID NO: 283 - protein, 1256 aa, synthetic construct
QCVNLITRTQSYTNSFTRGVYYPDKVFRSSVLHSTQDLFLPFFSNVTWFHAIHVSGTNGTKRFDNPALPFNDGVYFASTEKSNIIRGWIFGTTLDSKTQSLLIVNNATNVVIKVCEFQFCNDPFLDVYQKNNKSWMESEFRVYSSANNCTFEYVSQPFLMDLEGKEGNFKNLREFVFKNIDGYFKIYSKHTPINLERDLPQGFSALEPLVDLPIGINITRFQTLLALHRSYLTPGGSSSGWTAGAAAYYVGYLQPRTFLLKYNENGTITDAVDCALDPLSETKCTLKSFTVEKGIYQTSNFRVQPTESIVRFPNITNLCPFHEVFNATTFASVYAWNRKRISNCVADYSVIYNFAPFFAFKCYGVSPTKLNDLCFTNVYADSFVIRGNEVSQIAPGQTGNIADYNYKLPDDFTGCVIAWNSNKLDSKPSGNYNYLYRLFRKSKLKPFERDISTEIYQAGNKPCNGVAGPNCYSPLQSYGFRPTYGVGHQPYRVVVLSFELLHASATVCGPKKSTNLVKNKCVNFNFNGLTGTGVLTESNKKFLPFQQFGRDIADTTDAVRDPQTLEILDITPCSFGGVSVITPGTNTSNQVAVLYQGVNCTEVPVAIHADQLTPTWRVYSTGSNVFQTRAGCLIGAEYVNNSYECDIPIGAGICASYQTQTKSHRRARSVASQSIIAYTMSLGAENSVAYSNNSIAIPTNFTISVTTEILPVSMTKTSVDCTMYICGDSTECSNLLLQYGSFCTQLKRALTGIAVEQDKNTQEVFAQVKQIYKTPPIKYFGGFNFSQILPDPSKPSKRSFIEDLLFNKVTLADAGFIKQYGDCLGDIAARDLICAQKFNGLTVLPPLLTDEMIAQYTSALLAGTITSGWTFGAGAALQIPFAMQMAYRFNGIGVTQNVLYENQKLIANQFNSAIGKIQDSLSSTASALGKLQDVVNHNAQALNTLVKQLSSKFGAISSVLNDILSRLDKVEAEVQIDRLITGRLQSLQTYVTQQLIRAAEIRASANLAATKMSECVLGQSKRVDFCGKGYHLMSFPQSAPHGVVFLHVTYVPAQEKNFTTAPAICHDGKAHFPREGVFVSNGTHWFVTQRNFYEPQIITTDNTFVSGNCDVVIGIVNNTVYDPLQPELDSFKEELDKYFKNHTSPDVDLGDISGINASVVNIQKEIDRLNEVAKNLNESLIDLQELGKYEQYIKWPWYIWLGFIAGLIAIVMVTIMLCCMTSCCSCLKGCCSCGSCCKFDEDDSEPVLKGVKLHYT

SEQ ID NO: 284 - protein, 1256 aa, synthetic construct
QCVNLITRTQSYTNSFTRGVYYPDKVFRSSVLHSTQDLFLPFFSNVTWFHAIHVSGTNGTKRFDNPALPFNDGVYFASTEKSNIIRGWIFGTTLDSKTQSLLIVNNATNVVIKVCEFQFCNDPFLDVYQKNNKSWMESEFRVYSSANNCTFEYVSQPFLMDLEGKEGNFKNLREFVFKNIDGYFKIYSKHTPINLERDLPQGFSALEPLVDLPIGINITRFQTLLALHRSYLTPGGSSSGWTAGAAAYYVGYLQPRTFLLKYNENGTITDAVDCALDPLSETKCTLKSFTVEKGIYQTSNFRVQPTESIVRFPNITNLCPFHEVFNATTFASVYAWNRKRISNCVADYSVIYNFAPFFAFKCYGVSPTKLNDLCFTNVYADSFVIRGNEVSQIAPGQTGNIADYNYKLPDDFTGCVIAWNSNKLDSKPSGNYNYLYRLFRKSKLKPFERDISTEIYQAGNKPCNGVAGPNCYSPLQSYGFRPTYGVGHQPYRVVVLSFELLHASATVCGPKKSTNLVKNKCVNFNFNGLTGTGVLTESNKKFLPFQQFGRDIADTTDAVRDPQTLEILDITPCSFGGVSVITPGTNTSNQVAVLYQGVNCTEVPVAIHADQLTPTWRVYSTGSNVFQTRAGCLIGAEYVNNSYECDIPIGAGICASYQTQTKSHQQAQSVASQSIIAYTMSLGAENSVAYSNNSIAIPTNFTISVTTEILPVSMTKTSVDCTMYICGDSTECSNLLLQYGSFCTQLKRALTGIAVEQDKNTQEVFAQVKQIYKTPPIKYFGGFNFSQILPDPSKPSKRSFIEDLLFNKVTLADAGFIKQYGDCLGDIAARDLICAQKFNGLTVLPPLLTDEMIAQYTSALLAGTITSGWTFGAGAALQIPFAMQMAYRFNGIGVTQNVLYENQKLIANQFNSAIGKIQDSLSSTASALGKLQDVVNHNAQALNTLVKQLSSKFGAISSVLNDILSRLDPPEAEVQIDRLITGRLQSLQTYVTQQLIRAAEIRASANLAATKMSECVLGQSKRVDFCGKGYHLMSFPQSAPHGVVFLHVTYVPAQEKNFTTAPAICHDGKAHFPREGVFVSNGTHWFVTQRNFYEPQIITTDNTFVSGNCDVVIGIVNNTVYDPLQPELDSFKEELDKYFKNHTSPDVDLGDISGINASVVNIQKEIDRLNEVAKNLNESLIDLQELGKYEQYIKWPWYIWLGFIAGLIAIVMVTIMLCCMTSCCSCLKGCCSCGSCCKFDEDDSEPVLKGVKLHYT

SEQ ID NO: 285 - protein, 1269 aa, synthetic construct
MFVFLVLLPLVSSQCVNLITRTQSYTNSFTRGVYYPDKVFRSSVLHSTQDLFLPFFSNVTWFHAIHVSGTNGTKRFDNPALPFNDGVYFASTEKSNIIRGWIFGTTLDSKTQSLLIVNNATNVVIKVCEFQFCNDPFLDVYQKNNKSWMESEFRVYSSANNCTFEYVSQPFLMDLEGKEGNFKNLREFVFKNIDGYFKIYSKHTPINLERDLPQGFSALEPLVDLPIGINITRFQTLLALHRSYLTPGGSSSGWTAGAAAYYVGYLQPRTFLLKYNENGTITDAVDCALDPLSETKCTLKSFTVEKGIYQTSNFRVQPTESIVRFPNITNLCPFHEVFNATTFASVYAWNRKRISNCVADYSVIYNFAPFFAFKCYGVSPTKLNDLCFTNVYADSFVIRGNEVSQIAPGQTGNIADYNYKLPDDFTGCVIAWNSNKLDSTPSGNYNYLYRLFRKSKLKPFERDISTEIYQAGNKPCNGVAGPNCYSPLQSYGFRPTYGVGHQPYRVVVLSFELLHASATVCGPKKSTNLVKNKCVNFNFNGLTGTGVLTESNKKFLPFQQFGRDIADTTDAVRDPQTLEILDITPCSFGGVSVITPGTNTSNQVAVLYQGVNCTEVPVAIHADQLTPTWRVYSTGSNVFQTRAGCLIGAEYVNNSYECDIPIGAGICASYQTQTKSHRRARSVASQSIIAYTMSLGAENSVAYSNNSIAIPTNFTISVTTEILPVSMTKTSVDCTMYICGDSTECSNLLLQYGSFCTQLKRALTGIAVEQDKNTQEVFAQVKQIYKTPPIKYFGGFNFSQILPDPSKPSKRSFIEDLLFNKVTLADAGFIKQYGDCLGDIAARDLICAQKFNGLTVLPPLLTDEMIAQYTSALLAGTITSGWTFGAGAALQIPFAMQMAYRFNGIGVTQNVLYENQKLIANQFNSAIGKIQDSLSSTASALGKLQDVVNHNAQALNTLVKQLSSKFGAISSVLNDILSRLDKVEAEVQIDRLITGRLQSLQTYVTQQLIRAAEIRASANLAATKMSECVLGQSKRVDFCGKGYHLMSFPQSAPHGVVFLHVTYVPAQEKNFTTAPAICHDGKAHFPREGVFVSNGTHWFVTQRNFYEPQIITTDNTFVSGNCDVVIGIVNNTVYDPLQPELDSFKEELDKYFKNHTSPDVDLGDISGINASVVNIQKEIDRLNEVAKNLNESLIDLQELGKYEQYIKWPWYIWLGFIAGLIAIVMVTIMLCCMTSCCSCLKGCCSCGSCCKFDEDDSEPVLKGVKLHYT

SEQ ID NO: 286 - protein, 1269 aa, synthetic construct
MFVFLVLLPLVSSQCVNLITRTQSYTNSFTRGVYYPDKVFRSSVLHSTQDLFLPFFSNVTWFHAIHVSGTNGTKRFDNPALPFNDGVYFASTEKSNIIRGWIFGTTLDSKTQSLLIVNNATNVVIKVCEFQFCNDPFLDVYQKNNKSWMESEFRVYSSANNCTFEYVSQPFLMDLEGKEGNFKNLREFVFKNIDGYFKIYSKHTPINLERDLPQGFSALEPLVDLPIGINITRFQTLLALHRSYLTPGGSSSGWTAGAAAYYVGYLQPRTFLLKYNENGTITDAVDCALDPLSETKCTLKSFTVEKGIYQTSNFRVQPTESIVRFPNITNLCPFHEVFNATTFASVYAWNRKRISNCVADYSVIYNFAPFFAFKCYGVSPTKLNDLCFTNVYADSFVIRGNEVSQIAPGQTGNIADYNYKLPDDFTGCVIAWNSNKLDSTPSGNYNYLYRLFRKSKLKPFERDISTEIYQAGNKPCNGVAGPNCYSPLQSYGFRPTYGVGHQPYRVVVLSFELLHASATVCGPKKSTNLVKNKCVNFNFNGLTGTGVLTESNKKFLPFQQFGRDIADTTDAVRDPQTLEILDITPCSFGGVSVITPGTNTSNQVAVLYQGVNCTEVPVAIHADQLTPTWRVYSTGSNVFQTRAGCLIGAEYVNNSYECDIPIGAGICASYQTQTKSHQQAQSVASQSIIAYTMSLGAENSVAYSNNSIAIPTNFTISVTTEILPVSMTKTSVDCTMYICGDSTECSNLLLQYGSFCTQLKRALTGIAVEQDKNTQEVFAQVKQIYKTPPIKYFGGFNFSQILPDPSKPSKRSFIEDLLFNKVTLADAGFIKQYGDCLGDIAARDLICAQKFNGLTVLPPLLTDEMIAQYTSALLAGTITSGWTFGAGAALQIPFAMQMAYRFNGIGVTQNVLYENQKLIANQFNSAIGKIQDSLSSTASALGKLQDVVNHNAQALNTLVKQLSSKFGAISSVLNDILSRLDPPEAEVQIDRLITGRLQSLQTYVTQQLIRAAEIRASANLAATKMSECVLGQSKRVDFCGKGYHLMSFPQSAPHGVVFLHVTYVPAQEKNFTTAPAICHDGKAHFPREGVFVSNGTHWFVTQRNFYEPQIITTDNTFVSGNCDVVIGIVNNTVYDPLQPELDSFKEELDKYFKNHTSPDVDLGDISGINASVVNIQKEIDRLNEVAKNLNESLIDLQELGKYEQYIKWPWYIWLGFIAGLIAIVMVTIMLCCMTSCCSCLKGCCSCGSCCKFDEDDSEPVLKGVKLHYT

SEQ ID NO: 287 - protein, 1256 aa, synthetic construct
QCVNLITRTQSYTNSFTRGVYYPDKVFRSSVLHSTQDLFLPFFSNVTWFHAIHVSGTNGTKRFDNPALPFNDGVYFASTEKSNIIRGWIFGTTLDSKTQSLLIVNNATNVVIKVCEFQFCNDPFLDVYQKNNKSWMESEFRVYSSANNCTFEYVSQPFLMDLEGKEGNFKNLREFVFKNIDGYFKIYSKHTPINLERDLPQGFSALEPLVDLPIGINITRFQTLLALHRSYLTPGGSSSGWTAGAAAYYVGYLQPRTFLLKYNENGTITDAVDCALDPLSETKCTLKSFTVEKGIYQTSNFRVQPTESIVRFPNITNLCPFHEVFNATTFASVYAWNRKRISNCVADYSVIYNFAPFFAFKCYGVSPTKLNDLCFTNVYADSFVIRGNEVSQIAPGQTGNIADYNYKLPDDFTGCVIAWNSNKLDSTPSGNYNYLYRLFRKSKLKPFERDISTEIYQAGNKPCNGVAGPNCYSPLQSYGFRPTYGVGHQPYRVVVLSFELLHASATVCGPKKSTNLVKNKCVNFNFNGLTGTGVLTESNKKFLPFQQFGRDIADTTDAVRDPQTLEILDITPCSFGGVSVITPGTNTSNQVAVLYQGVNCTEVPVAIHADQLTPTWRVYSTGSNVFQTRAGCLIGAEYVNNSYECDIPIGAGICASYQTQTKSHRRARSVASQSIIAYTMSLGAENSVAYSNNSIAIPTNFTISVTTEILPVSMTKTSVDCTMYICGDSTECSNLLLQYGSFCTQLKRALTGIAVEQDKNTQEVFAQVKQIYKTPPIKYFGGFNFSQILPDPSKPSKRSFIEDLLFNKVTLADAGFIKQYGDCLGDIAARDLICAQKFNGLTVLPPLLTDEMIAQYTSALLAGTITSGWTFGAGAALQIPFAMQMAYRFNGIGVTQNVLYENQKLIANQFNSAIGKIQDSLSSTASALGKLQDVVNHNAQALNTLVKQLSSKFGAISSVLNDILSRLDKVEAEVQIDRLITGRLQSLQTYVTQQLIRAAEIRASANLAATKMSECVLGQSKRVDFCGKGYHLMSFPQSAPHGVVFLHVTYVPAQEKNFTTAPAICHDGKAHFPREGVFVSNGTHWFVTQRNFYEPQIITTDNTFVSGNCDVVIGIVNNTVYDPLQPELDSFKEELDKYFKNHTSPDVDLGDISGINASVVNIQKEIDRLNEVAKNLNESLIDLQELGKYEQYIKWPWYIWLGFIAGLIAIVMVTIMLCCMTSCCSCLKGCCSCGSCCKFDEDDSEPVLKGVKLHYT

SEQ ID NO: 288 - protein, 1256 aa, synthetic construct
QCVNLITRTQSYTNSFTRGVYYPDKVFRSSVLHSTQDLFLPFFSNVTWFHAIHVSGTNGTKRFDNPALPFNDGVYFASTEKSNIIRGWIFGTTLDSKTQSLLIVNNATNVVIKVCEFQFCNDPFLDVYQKNNKSWMESEFRVYSSANNCTFEYVSQPFLMDLEGKEGNFKNLREFVFKNIDGYFKIYSKHTPINLERDLPQGFSALEPLVDLPIGINITRFQTLLALHRSYLTPGGSSSGWTAGAAAYYVGYLQPRTFLLKYNENGTITDAVDCALDPLSETKCTLKSFTVEKGIYQTSNFRVQPTESIVRFPNITNLCPFHEVFNATTFASVYAWNRKRISNCVADYSVIYNFAPFFAFKCYGVSPTKLNDLCFTNVYADSFVIRGNEVSQIAPGQTGNIADYNYKLPDDFTGCVIAWNSNKLDSTPSGNYNYLYRLFRKSKLKPFERDISTEIYQAGNKPCNGVAGPNCYSPLQSYGFRPTYGVGHQPYRVVVLSFELLHASATVCGPKKSTNLVKNKCVNFNFNGLTGTGVLTESNKKFLPFQQFGRDIADTTDAVRDPQTLEILDITPCSFGGVSVITPGTNTSNQVAVLYQGVNCTEVPVAIHADQLTPTWRVYSTGSNVFQTRAGCLIGAEYVNNSYECDIPIGAGICASYQTQTKSHQQAQSVASQSIIAYTMSLGAENSVAYSNNSIAIPTNFTISVTTEILPVSMTKTSVDCTMYICGDSTECSNLLLQYGSFCTQLKRALTGIAVEQDKNTQEVFAQVKQIYKTPPIKYFGGFNFSQILPDPSKPSKRSFIEDLLFNKVTLADAGFIKQYGDCLGDIAARDLICAQKFNGLTVLPPLLTDEMIAQYTSALLAGTITSGWTFGAGAALQIPFAMQMAYRFNGIGVTQNVLYENQKLIANQFNSAIGKIQDSLSSTASALGKLQDVVNHNAQALNTLVKQLSSKFGAISSVLNDILSRLDPPEAEVQIDRLITGRLQSLQTYVTQQLIRAAEIRASANLAATKMSECVLGQSKRVDFCGKGYHLMSFPQSAPHGVVFLHVTYVPAQEKNFTTAPAICHDGKAHFPREGVFVSNGTHWFVTQRNFYEPQIITTDNTFVSGNCDVVIGIVNNTVYDPLQPELDSFKEELDKYFKNHTSPDVDLGDISGINASVVNIQKEIDRLNEVAKNLNESLIDLQELGKYEQYIKWPWYIWLGFIAGLIAIVMVTIMLCCMTSCCSCLKGCCSCGSCCKFDEDDSEPVLKGVKLHYT

SEQ ID NO: 289 - protein, 1269 aa, synthetic construct
MFVFLVLLPLVSSQCVNLITRTQSYTNSFTRGVYYPDKVFRSSVLHSTQDLFLPFFSNVTWFHAIHVSGTNGTKRFDNPALPFNDGVYFASTEKSNIIRGWIFGTTLDSKTQSLLIVNNATNVVIKVCEFQFCNDPFLDVYQKNNKSWMESEFRVYSSANNCTFEYVSQPFLMDLEGKEGNFKNLREFVFKNIDGYFKIYSKHTPINLERDLPQGFSALEPLVDLPIGINITRFQTLLALHRSYLTPGGSSSGWTAGAAAYYVGYLQPRTFLLKYNENGTITDAVDCALDPLSETKCTLKSFTVEKGIYQTSNFRVQPTESIVRFPNITNLCPFHEVFNATTFASVYAWNRKRISNCVADYSVIYNFAPFFAFKCYGVSPTKLNDLCFTNVYADSFVIRGNEVSQIAPGQTGNIADYNYKLPDDFTGCVIAWNSNKLDSKPSGNYNYLYRLFRKSKLKPFERDISTEIYQAGNKPCNGVAGSNCYSPLQSYGFRPTYGVGHQPYRVVVLSFELLHASATVCGPKKSTNLVKNKCVNFNFNGLTGTGVLTESNKKFLPFQQFGRDIADTTDAVRDPQTLEILDITPCSFGGVSVITPGTNTSNQVAVLYQGVNCTEVPVAIHADQLTPTWRVYSTGSNVFQTRAGCLIGAEYVNNSYECDIPIGAGICASYQTQTKSHRRARSVASQSIIAYTMSLGAENSVAYSNNSIAIPTNFTISVTTEILPVSMTKTSVDCTMYICGDSTECSNLLLQYGSFCTQLKRALTGIAVEQDKNTQEVFAQVKQIYKTPPIKYFGGFNFSQILPDPSKPSKRSFIEDLLFNKVTLADAGFIKQYGDCLGDIAARDLICAQKFNGLTVLPPLLTDEMIAQYTSALLAGTITSGWTFGAGAALQIPFAMQMAYRFNGIGVTQNVLYENQKLIANQFNSAIGKIQDSLSSTASALGKLQDVVNHNAQALNTLVKQLSSKFGAISSVLNDILSRLDKVEAEVQIDRLITGRLQSLQTYVTQQLIRAAEIRASANLAATKMSECVLGQSKRVDFCGKGYHLMSFPQSAPHGVVFLHVTYVPAQEKNFTTAPAICHDGKAHFPREGVFVSNGTHWFVTQRNFYEPQIITTDNTFVSGNCDVVIGIVNNTVYDPLQPELDSFKEELDKYFKNHTSPDVDLGDISGINASVVNIQKEIDRLNEVAKNLNESLIDLQELGKYEQYIKWPWYIWLGFIAGLIAIVMVTIMLCCMTSCCSCLKGCCSCGSCCKFDEDDSEPVLKGVKLHYT

SEQ ID NO: 290 - protein, 1269 aa, synthetic construct
MFVFLVLLPLVSSQCVNLITRTQSYTNSFTRGVYYPDKVFRSSVLHSTQDLFLPFFSNVTWFHAIHVSGTNGTKRFDNPALPFNDGVYFASTEKSNIIRGWIFGTTLDSKTQSLLIVNNATNVVIKVCEFQFCNDPFLDVYQKNNKSWMESEFRVYSSANNCTFEYVSQPFLMDLEGKEGNFKNLREFVFKNIDGYFKIYSKHTPINLERDLPQGFSALEPLVDLPIGINITRFQTLLALHRSYLTPGGSSSGWTAGAAAYYVGYLQPRTFLLKYNENGTITDAVDCALDPLSETKCTLKSFTVEKGIYQTSNFRVQPTESIVRFPNITNLCPFHEVFNATTFASVYAWNRKRISNCVADYSVIYNFAPFFAFKCYGVSPTKLNDLCFTNVYADSFVIRGNEVSQIAPGQTGNIADYNYKLPDDFTGCVIAWNSNKLDSKPSGNYNYLYRLFRKSKLKPFERDISTEIYQAGNKPCNGVAGSNCYSPLQSYGFRPTYGVGHQPYRVVVLSFELLHASATVCGPKKSTNLVKNKCVNFNFNGLTGTGVLTESNKKFLPFQQFGRDIADTTDAVRDPQTLEILDITPCSFGGVSVITPGTNTSNQVAVLYQGVNCTEVPVAIHADQLTPTWRVYSTGSNVFQTRAGCLIGAEYVNNSYECDIPIGAGICASYQTQTKSHQQAQSVASQSIIAYTMSLGAENSVAYSNNSIAIPTNFTISVTTEILPVSMTKTSVDCTMYICGDSTECSNLLLQYGSFCTQLKRALTGIAVEQDKNTQEVFAQVKQIYKTPPIKYFGGFNFSQILPDPSKPSKRSFIEDLLFNKVTLADAGFIKQYGDCLGDIAARDLICAQKFNGLTVLPPLLTDEMIAQYTSALLAGTITSGWTFGAGAALQIPFAMQMAYRFNGIGVTQNVLYENQKLIANQFNSAIGKIQDSLSSTASALGKLQDVVNHNAQALNTLVKQLSSKFGAISSVLNDILSRLDPPEAEVQIDRLITGRLQSLQTYVTQQLIRAAEIRASANLAATKMSECVLGQSKRVDFCGKGYHLMSFPQSAPHGVVFLHVTYVPAQEKNFTTAPAICHDGKAHFPREGVFVSNGTHWFVTQRNFYEPQIITTDNTFVSGNCDVVIGIVNNTVYDPLQPELDSFKEELDKYFKNHTSPDVDLGDISGINASVVNIQKEIDRLNEVAKNLNESLIDLQELGKYEQYIKWPWYIWLGFIAGLIAIVMVTIMLCCMTSCCSCLKGCCSCGSCCKFDEDDSEPVLKGVKLHYT

SEQ ID NO: 291 - protein, 1256 aa, synthetic construct
QCVNLITRTQSYTNSFTRGVYYPDKVFRSSVLHSTQDLFLPFFSNVTWFHAIHVSGTNGTKRFDNPALPFNDGVYFASTEKSNIIRGWIFGTTLDSKTQSLLIVNNATNVVIKVCEFQFCNDPFLDVYQKNNKSWMESEFRVYSSANNCTFEYVSQPFLMDLEGKEGNFKNLREFVFKNIDGYFKIYSKHTPINLERDLPQGFSALEPLVDLPIGINITRFQTLLALHRSYLTPGGSSSGWTAGAAAYYVGYLQPRTFLLKYNENGTITDAVDCALDPLSETKCTLKSFTVEKGIYQTSNFRVQPTESIVRFPNITNLCPFHEVFNATTFASVYAWNRKRISNCVADYSVIYNFAPFFAFKCYGVSPTKLNDLCFTNVYADSFVIRGNEVSQIAPGQTGNIADYNYKLPDDFTGCVIAWNSNKLDSKPSGNYNYLYRLFRKSKLKPFERDISTEIYQAGNKPCNGVAGSNCYSPLQSYGFRPTYGVGHQPYRVVVLSFELLHASATVCGPKKSTNLVKNKCVNFNFNGLTGTGVLTESNKKFLPFQQFGRDIADTTDAVRDPQTLEILDITPCSFGGVSVITPGTNTSNQVAVLYQGVNCTEVPVAIHADQLTPTWRVYSTGSNVFQTRAGCLIGAEYVNNSYECDIPIGAGICASYQTQTKSHRRARSVASQSIIAYTMSLGAENSVAYSNNSIAIPTNFTISVTTEILPVSMTKTSVDCTMYICGDSTECSNLLLQYGSFCTQLKRALTGIAVEQDKNTQEVFAQVKQIYKTPPIKYFGGFNFSQILPDPSKPSKRSFIEDLLFNKVTLADAGFIKQYGDCLGDIAARDLICAQKFNGLTVLPPLLTDEMIAQYTSALLAGTITSGWTFGAGAALQIPFAMQMAYRFNGIGVTQNVLYENQKLIANQFNSAIGKIQDSLSSTASALGKLQDVVNHNAQALNTLVKQLSSKFGAISSVLNDILSRLDKVEAEVQIDRLITGRLQSLQTYVTQQLIRAAEIRASANLAATKMSECVLGQSKRVDFCGKGYHLMSFPQSAPHGVVFLHVTYVPAQEKNFTTAPAICHDGKAHFPREGVFVSNGTHWFVTQRNFYEPQIITTDNTFVSGNCDVVIGIVNNTVYDPLQPELDSFKEELDKYFKNHTSPDVDLGDISGINASVVNIQKEIDRLNEVAKNLNESLIDLQELGKYEQYIKWPWYIWLGFIAGLIAIVMVTIMLCCMTSCCSCLKGCCSCGSCCKFDEDDSEPVLKGVKLHYT

SEQ ID NO: 292 - protein, 1256 aa, synthetic construct
QCVNLITRTQSYTNSFTRGVYYPDKVFRSSVLHSTQDLFLPFFSNVTWFHAIHVSGTNGTKRFDNPALPFNDGVYFASTEKSNIIRGWIFGTTLDSKTQSLLIVNNATNVVIKVCEFQFCNDPFLDVYQKNNKSWMESEFRVYSSANNCTFEYVSQPFLMDLEGKEGNFKNLREFVFKNIDGYFKIYSKHTPINLERDLPQGFSALEPLVDLPIGINITRFQTLLALHRSYLTPGGSSSGWTAGAAAYYVGYLQPRTFLLKYNENGTITDAVDCALDPLSETKCTLKSFTVEKGIYQTSNFRVQPTESIVRFPNITNLCPFHEVFNATTFASVYAWNRKRISNCVADYSVIYNFAPFFAFKCYGVSPTKLNDLCFTNVYADSFVIRGNEVSQIAPGQTGNIADYNYKLPDDFTGCVIAWNSNKLDSKPSGNYNYLYRLFRKSKLKPFERDISTEIYQAGNKPCNGVAGSNCYSPLQSYGFRPTYGVGHQPYRVVVLSFELLHASATVCGPKKSTNLVKNKCVNFNFNGLTGTGVLTESNKKFLPFQQFGRDIADTTDAVRDPQTLEILDITPCSFGGVSVITPGTNTSNQVAVLYQGVNCTEVPVAIHADQLTPTWRVYSTGSNVFQTRAGCLIGAEYVNNSYECDIPIGAGICASYQTQTKSHQQAQSVASQSIIAYTMSLGAENSVAYSNNSIAIPTNFTISVTTEILPVSMTKTSVDCTMYICGDSTECSNLLLQYGSFCTQLKRALTGIAVEQDKNTQEVFAQVKQIYKTPPIKYFGGFNFSQILPDPSKPSKRSFIEDLLFNKVTLADAGFIKQYGDCLGDIAARDLICAQKFNGLTVLPPLLTDEMIAQYTSALLAGTITSGWTFGAGAALQIPFAMQMAYRFNGIGVTQNVLYENQKLIANQFNSAIGKIQDSLSSTASALGKLQDVVNHNAQALNTLVKQLSSKFGAISSVLNDILSRLDPPEAEVQIDRLITGRLQSLQTYVTQQLIRAAEIRASANLAATKMSECVLGQSKRVDFCGKGYHLMSFPQSAPHGVVFLHVTYVPAQEKNFTTAPAICHDGKAHFPREGVFVSNGTHWFVTQRNFYEPQIITTDNTFVSGNCDVVIGIVNNTVYDPLQPELDSFKEELDKYFKNHTSPDVDLGDISGINASVVNIQKEIDRLNEVAKNLNESLIDLQELGKYEQYIKWPWYIWLGFIAGLIAIVMVTIMLCCMTSCCSCLKGCCSCGSCCKFDEDDSEPVLKGVKLHYT

SEQ ID NO: 293 - protein, 1269 aa, Severe acute respiratory syndrome-related coronavirus
MFVFLVLLPLVSSQCVNLITRTQSYTNSFTRGVYYPDKVFRSSVLHSTHDLFLPFFSNVTWFHAIHVSGTNGTKRFDNPALPFNDGVYFASTEKSNIIRGWIFGTTLDSKTQSLLIVNNATNVVIKVCEFQFCNDPFLDVYQKNNKSWMESEFRVYSSANNCTFEYVSQPFLMDLEGKEGNFKNLREFVFKNIDGYFKIYSKHTPINLERDLPQGFSALEPLVDLPIGINITRFQTLLALHRSYLTPVDSSSGWTAGAAAYYVGYLQPRTFLLKYNENGTITDAVDCALDPLSETKCTLKSFTVEKGIYQTSNFRVQPTESIVRFPNITNLCPFHEVFNATTFASVYAWNRKRISNCVADYSVIYNFAPFFAFKCYGVSPTKLNDLCFTNVYADSFVIRGNEVSQIAPGQTGNIADYNYKLPDDFTGCVIAWNSNKLDSKPSGNYNYLYRLLRKSKLKPFERDISTEIYQAGNKPCNGVAGPNCYSPLQSYGFRPTYGVGHQPYRVVVLSFELLHAPATVCGPKKSTNLVKNKCVNFNFNGLTGTGVLTESNKKFLPFQQFGRDIADTTDAVRDPQTLEILDITPCSFGGVSVITPGTNTSNQVAVLYQGVNCTEVPVAIHADQLTPTWRVYSTGSNVFQTRAGCLIGAEYVNNSYECDIPIGAGICASYQTQTKSHRRARSVASQSIIAYTMSLGAENSVAYSNNSIAIPTNFTISVTTEILPVSMTKTSVDCTMYICGDSTECSNLLLQYGSFCTQLKRALTGIAVEQDKNTQEVFAQVKQIYKTPPIKYFGGFNFSQILPDPSKPSKRSFIEDLLFNKVTLADAGFIKQYGDCLGDIAARDLICAQKFNGLTVLPPLLTDEMIAQYTSALLAGTITSGWTFGAGAALQIPFAMQMAYRFNGIGVTQNVLYENQKLIANQFNSAIGKIQDSLSSTASALGKLQDVVNHNAQALNTLVKQLSSKFGAISSVLNDILSRLDKVEAEVQIDRLITGRLQSLQTYVTQQLIRAAEIRASANLAATKMSECVLGQSKRVDFCGKGYHLMSFPQSAPHGVVFLHVTYVPAQEKNFTTAPAICHDGKAHFPREGVFVSNGTHWFVTQRNFYEPQIITTDNTFVSGNCDVVIGIVNNTVYDPLQPELDSFKEELDKYFKNHTSPDVDLGDISGINASVVNIQKEIDRLNEVAKNLNESLIDLQELGKYEQYIKWPWYIWLGFIAGLIAIVMVTIMLCCMTSCCSCLKGCCSCGSCCKFDEDDSEPVLKGVKLHYT

SEQ ID NO: 294 - protein, 1256 aa, Severe acute respiratory syndrome-related coronavirus
QCVNLITRTQSYTNSFTRGVYYPDKVFRSSVLHSTHDLFLPFFSNVTWFHAIHVSGTNGTKRFDNPALPFNDGVYFASTEKSNIIRGWIFGTTLDSKTQSLLIVNNATNVVIKVCEFQFCNDPFLDVYQKNNKSWMESEFRVYSSANNCTFEYVSQPFLMDLEGKEGNFKNLREFVFKNIDGYFKIYSKHTPINLERDLPQGFSALEPLVDLPIGINITRFQTLLALHRSYLTPVDSSSGWTAGAAAYYVGYLQPRTFLLKYNENGTITDAVDCALDPLSETKCTLKSFTVEKGIYQTSNFRVQPTESIVRFPNITNLCPFHEVFNATTFASVYAWNRKRISNCVADYSVIYNFAPFFAFKCYGVSPTKLNDLCFTNVYADSFVIRGNEVSQIAPGQTGNIADYNYKLPDDFTGCVIAWNSNKLDSKPSGNYNYLYRLLRKSKLKPFERDISTEIYQAGNKPCNGVAGPNCYSPLQSYGFRPTYGVGHQPYRVVVLSFELLHAPATVCGPKKSTNLVKNKCVNFNFNGLTGTGVLTESNKKFLPFQQFGRDIADTTDAVRDPQTLEILDITPCSFGGVSVITPGTNTSNQVAVLYQGVNCTEVPVAIHADQLTPTWRVYSTGSNVFQTRAGCLIGAEYVNNSYECDIPIGAGICASYQTQTKSHRRARSVASQSIIAYTMSLGAENSVAYSNNSIAIPTNFTISVTTEILPVSMTKTSVDCTMYICGDSTECSNLLLQYGSFCTQLKRALTGIAVEQDKNTQEVFAQVKQIYKTPPIKYFGGFNFSQILPDPSKPSKRSFIEDLLFNKVTLADAGFIKQYGDCLGDIAARDLICAQKFNGLTVLPPLLTDEMIAQYTSALLAGTITSGWTFGAGAALQIPFAMQMAYRFNGIGVTQNVLYENQKLIANQFNSAIGKIQDSLSSTASALGKLQDVVNHNAQALNTLVKQLSSKFGAISSVLNDILSRLDKVEAEVQIDRLITGRLQSLQTYVTQQLIRAAEIRASANLAATKMSECVLGQSKRVDFCGKGYHLMSFPQSAPHGVVFLHVTYVPAQEKNFTTAPAICHDGKAHFPREGVFVSNGTHWFVTQRNFYEPQIITTDNTFVSGNCDVVIGIVNNTVYDPLQPELDSFKEELDKYFKNHTSPDVDLGDISGINASVVNIQKEIDRLNEVAKNLNESLIDLQELGKYEQYIKWPWYIWLGFIAGLIAIVMVTIMLCCMTSCCSCLKGCCSCGSCCKFDEDDSEPVLKGVKLHYT

SEQ ID NO: 295 - protein, 1269 aa, synthetic construct
MFVFLVLLPLVSSQCVNLITRTQSYTNSFTRGVYYPDKVFRSSVLHSTHDLFLPFFSNVTWFHAIHVSGTNGTKRFDNPALPFNDGVYFASTEKSNIIRGWIFGTTLDSKTQSLLIVNNATNVVIKVCEFQFCNDPFLDVYQKNNKSWMESEFRVYSSANNCTFEYVSQPFLMDLEGKEGNFKNLREFVFKNIDGYFKIYSKHTPINLERDLPQGFSALEPLVDLPIGINITRFQTLLALHRSYLTPVDSSSGWTAGAAAYYVGYLQPRTFLLKYNENGTITDAVDCALDPLSETKCTLKSFTVEKGIYQTSNFRVQPTESIVRFPNITNLCPFHEVFNATTFASVYAWNRKRISNCVADYSVIYNFAPFFAFKCYGVSPTKLNDLCFTNVYADSFVIRGNEVSQIAPGQTGNIADYNYKLPDDFTGCVIAWNSNKLDSKPSGNYNYLYRLLRKSKLKPFERDISTEIYQAGNKPCNGVAGPNCYSPLQSYGFRPTYGVGHQPYRVVVLSFELLHAPATVCGPKKSTNLVKNKCVNFNFNGLTGTGVLTESNKKFLPFQQFGRDIADTTDAVRDPQTLEILDITPCSFGGVSVITPGTNTSNQVAVLYQGVNCTEVPVAIHADQLTPTWRVYSTGSNVFQTRAGCLIGAEYVNNSYECDIPIGAGICASYQTQTKSHQQAQSVASQSIIAYTMSLGAENSVAYSNNSIAIPTNFTISVTTEILPVSMTKTSVDCTMYICGDSTECSNLLLQYGSFCTQLKRALTGIAVEQDKNTQEVFAQVKQIYKTPPIKYFGGFNFSQILPDPSKPSKRSFIEDLLFNKVTLADAGFIKQYGDCLGDIAARDLICAQKFNGLTVLPPLLTDEMIAQYTSALLAGTITSGWTFGAGAALQIPFAMQMAYRFNGIGVTQNVLYENQKLIANQFNSAIGKIQDSLSSTASALGKLQDVVNHNAQALNTLVKQLSSKFGAISSVLNDILSRLDPPEAEVQIDRLITGRLQSLQTYVTQQLIRAAEIRASANLAATKMSECVLGQSKRVDFCGKGYHLMSFPQSAPHGVVFLHVTYVPAQEKNFTTAPAICHDGKAHFPREGVFVSNGTHWFVTQRNFYEPQIITTDNTFVSGNCDVVIGIVNNTVYDPLQPELDSFKEELDKYFKNHTSPDVDLGDISGINASVVNIQKEIDRLNEVAKNLNESLIDLQELGKYEQYIKWPWYIWLGFIAGLIAIVMVTIMLCCMTSCCSCLKGCCSCGSCCKFDEDDSEPVLKGVKLHYT

SEQ ID NO: 296 - protein, 1256 aa, synthetic construct
QCVNLITRTQSYTNSFTRGVYYPDKVFRSSVLHSTHDLFLPFFSNVTWFHAIHVSGTNGTKRFDNPALPFNDGVYFASTEKSNIIRGWIFGTTLDSKTQSLLIVNNATNVVIKVCEFQFCNDPFLDVYQKNNKSWMESEFRVYSSANNCTFEYVSQPFLMDLEGKEGNFKNLREFVFKNIDGYFKIYSKHTPINLERDLPQGFSALEPLVDLPIGINITRFQTLLALHRSYLTPVDSSSGWTAGAAAYYVGYLQPRTFLLKYNENGTITDAVDCALDPLSETKCTLKSFTVEKGIYQTSNFRVQPTESIVRFPNITNLCPFHEVFNATTFASVYAWNRKRISNCVADYSVIYNFAPFFAFKCYGVSPTKLNDLCFTNVYADSFVIRGNEVSQIAPGQTGNIADYNYKLPDDFTGCVIAWNSNKLDSKPSGNYNYLYRLLRKSKLKPFERDISTEIYQAGNKPCNGVAGPNCYSPLQSYGFRPTYGVGHQPYRVVVLSFELLHAPATVCGPKKSTNLVKNKCVNFNFNGLTGTGVLTESNKKFLPFQQFGRDIADTTDAVRDPQTLEILDITPCSFGGVSVITPGTNTSNQVAVLYQGVNCTEVPVAIHADQLTPTWRVYSTGSNVFQTRAGCLIGAEYVNNSYECDIPIGAGICASYQTQTKSHQQAQSVASQSIIAYTMSLGAENSVAYSNNSIAIPTNFTISVTTEILPVSMTKTSVDCTMYICGDSTECSNLLLQYGSFCTQLKRALTGIAVEQDKNTQEVFAQVKQIYKTPPIKYFGGFNFSQILPDPSKPSKRSFIEDLLFNKVTLADAGFIKQYGDCLGDIAARDLICAQKFNGLTVLPPLLTDEMIAQYTSALLAGTITSGWTFGAGAALQIPFAMQMAYRFNGIGVTQNVLYENQKLIANQFNSAIGKIQDSLSSTASALGKLQDVVNHNAQALNTLVKQLSSKFGAISSVLNDILSRLDPPEAEVQIDRLITGRLQSLQTYVTQQLIRAAEIRASANLAATKMSECVLGQSKRVDFCGKGYHLMSFPQSAPHGVVFLHVTYVPAQEKNFTTAPAICHDGKAHFPREGVFVSNGTHWFVTQRNFYEPQIITTDNTFVSGNCDVVIGIVNNTVYDPLQPELDSFKEELDKYFKNHTSPDVDLGDISGINASVVNIQKEIDRLNEVAKNLNESLIDLQELGKYEQYIKWPWYIWLGFIAGLIAIVMVTIMLCCMTSCCSCLKGCCSCGSCCKFDEDDSEPVLKGVKLHYT

SEQ ID NO: 297 - protein, 1269 aa, synthetic construct
MFVFLVLLPLVSSQCVNLITRTQSYTNSFTRGVYYPDKVFRSSVLHSTHDLFLPFFSNVTWFHAIHVSGTNGTKRFDNPALPFNDGVYFASTEKSNIIRGWIFGTTLDSKTQSLLIVNNATNVVIKVCEFQFCNDPFLDVYQKNNKSWMESEFRVYSSANNCTFEYVSQPFLMDLEGKEGNFKNLREFVFKNIDGYFKIYSKHTPINLERDLPQGFSALEPLVDLPIGINITRFQTLLALHRSYLTPVDSSSGWTAGAAAYYVGYLQPRTFLLKYNENGTITDAVDCALDPLSETKCTLKSFTVEKGIYQTSNFRVQPTESIVRFPNITNLCPFHEVFNATTFASVYAWNRKRISNCVADYSVIYNFAPFFAFKCYGVSPTKLNDLCFTNVYADSFVIRGNEVSQIAPGQTGNIADYNYKLPDDFTGCVIAWNSNKLDSKPSGNYNYLYRLLRKSKLKPFERDISTEIYQAGNKPCNGVAGPNCYSPLQSYGFRPTYGVGHQPYRVVVLSFELLHASATVCGPKKSTNLVKNKCVNFNFNGLTGTGVLTESNKKFLPFQQFGRDIADTTDAVRDPQTLEILDITPCSFGGVSVITPGTNTSNQVAVLYQGVNCTEVPVAIHADQLTPTWRVYSTGSNVFQTRAGCLIGAEYVNNSYECDIPIGAGICASYQTQTKSHRRARSVASQSIIAYTMSLGAENSVAYSNNSIAIPTNFTISVTTEILPVSMTKTSVDCTMYICGDSTECSNLLLQYGSFCTQLKRALTGIAVEQDKNTQEVFAQVKQIYKTPPIKYFGGFNFSQILPDPSKPSKRSFIEDLLFNKVTLADAGFIKQYGDCLGDIAARDLICAQKFNGLTVLPPLLTDEMIAQYTSALLAGTITSGWTFGAGAALQIPFAMQMAYRFNGIGVTQNVLYENQKLIANQFNSAIGKIQDSLSSTASALGKLQDVVNHNAQALNTLVKQLSSKFGAISSVLNDILSRLDKVEAEVQIDRLITGRLQSLQTYVTQQLIRAAEIRASANLAATKMSECVLGQSKRVDFCGKGYHLMSFPQSAPHGVVFLHVTYVPAQEKNFTTAPAICHDGKAHFPREGVFVSNGTHWFVTQRNFYEPQIITTDNTFVSGNCDVVIGIVNNTVYDPLQPELDSFKEELDKYFKNHTSPDVDLGDISGINASVVNIQKEIDRLNEVAKNLNESLIDLQELGKYEQYIKWPWYIWLGFIAGLIAIVMVTIMLCCMTSCCSCLKGCCSCGSCCKFDEDDSEPVLKGVKLHYT

SEQ ID NO: 298 - protein, 1256 aa, synthetic construct
QCVNLITRTQSYTNSFTRGVYYPDKVFRSSVLHSTHDLFLPFFSNVTWFHAIHVSGTNGTKRFDNPALPFNDGVYFASTEKSNIIRGWIFGTTLDSKTQSLLIVNNATNVVIKVCEFQFCNDPFLDVYQKNNKSWMESEFRVYSSANNCTFEYVSQPFLMDLEGKEGNFKNLREFVFKNIDGYFKIYSKHTPINLERDLPQGFSALEPLVDLPIGINITRFQTLLALHRSYLTPVDSSSGWTAGAAAYYVGYLQPRTFLLKYNENGTITDAVDCALDPLSETKCTLKSFTVEKGIYQTSNFRVQPTESIVRFPNITNLCPFHEVFNATTFASVYAWNRKRISNCVADYSVIYNFAPFFAFKCYGVSPTKLNDLCFTNVYADSFVIRGNEVSQIAPGQTGNIADYNYKLPDDFTGCVIAWNSNKLDSKPSGNYNYLYRLLRKSKLKPFERDISTEIYQAGNKPCNGVAGPNCYSPLQSYGFRPTYGVGHQPYRVVVLSFELLHASATVCGPKKSTNLVKNKCVNFNFNGLTGTGVLTESNKKFLPFQQFGRDIADTTDAVRDPQTLEILDITPCSFGGVSVITPGTNTSNQVAVLYQGVNCTEVPVAIHADQLTPTWRVYSTGSNVFQTRAGCLIGAEYVNNSYECDIPIGAGICASYQTQTKSHRRARSVASQSIIAYTMSLGAENSVAYSNNSIAIPTNFTISVTTEILPVSMTKTSVDCTMYICGDSTECSNLLLQYGSFCTQLKRALTGIAVEQDKNTQEVFAQVKQIYKTPPIKYFGGFNFSQILPDPSKPSKRSFIEDLLFNKVTLADAGFIKQYGDCLGDIAARDLICAQKFNGLTVLPPLLTDEMIAQYTSALLAGTITSGWTFGAGAALQIPFAMQMAYRFNGIGVTQNVLYENQKLIANQFNSAIGKIQDSLSSTASALGKLQDVVNHNAQALNTLVKQLSSKFGAISSVLNDILSRLDKVEAEVQIDRLITGRLQSLQTYVTQQLIRAAEIRASANLAATKMSECVLGQSKRVDFCGKGYHLMSFPQSAPHGVVFLHVTYVPAQEKNFTTAPAICHDGKAHFPREGVFVSNGTHWFVTQRNFYEPQIITTDNTFVSGNCDVVIGIVNNTVYDPLQPELDSFKEELDKYFKNHTSPDVDLGDISGINASVVNIQKEIDRLNEVAKNLNESLIDLQELGKYEQYIKWPWYIWLGFIAGLIAIVMVTIMLCCMTSCCSCLKGCCSCGSCCKFDEDDSEPVLKGVKLHYT

SEQ ID NO: 299 - protein, 1269 aa, synthetic construct
MFVFLVLLPLVSSQCVNLITRTQSYTNSFTRGVYYPDKVFRSSVLHSTHDLFLPFFSNVTWFHAIHVSGTNGTKRFDNPALPFNDGVYFASTEKSNIIRGWIFGTTLDSKTQSLLIVNNATNVVIKVCEFQFCNDPFLDVYQKNNKSWMESEFRVYSSANNCTFEYVSQPFLMDLEGKEGNFKNLREFVFKNIDGYFKIYSKHTPINLERDLPQGFSALEPLVDLPIGINITRFQTLLALHRSYLTPVDSSSGWTAGAAAYYVGYLQPRTFLLKYNENGTITDAVDCALDPLSETKCTLKSFTVEKGIYQTSNFRVQPTESIVRFPNITNLCPFHEVFNATTFASVYAWNRKRISNCVADYSVIYNFAPFFAFKCYGVSPTKLNDLCFTNVYADSFVIRGNEVSQIAPGQTGNIADYNYKLPDDFTGCVIAWNSNKLDSKPSGNYNYLYRLLRKSKLKPFERDISTEIYQAGNKPCNGVAGPNCYSPLQSYGFRPTYGVGHQPYRVVVLSFELLHASATVCGPKKSTNLVKNKCVNFNFNGLTGTGVLTESNKKFLPFQQFGRDIADTTDAVRDPQTLEILDITPCSFGGVSVITPGTNTSNQVAVLYQGVNCTEVPVAIHADQLTPTWRVYSTGSNVFQTRAGCLIGAEYVNNSYECDIPIGAGICASYQTQTKSHQQAQSVASQSIIAYTMSLGAENSVAYSNNSIAIPTNFTISVTTEILPVSMTKTSVDCTMYICGDSTECSNLLLQYGSFCTQLKRALTGIAVEQDKNTQEVFAQVKQIYKTPPIKYFGGFNFSQILPDPSKPSKRSFIEDLLFNKVTLADAGFIKQYGDCLGDIAARDLICAQKFNGLTVLPPLLTDEMIAQYTSALLAGTITSGWTFGAGAALQIPFAMQMAYRFNGIGVTQNVLYENQKLIANQFNSAIGKIQDSLSSTASALGKLQDVVNHNAQALNTLVKQLSSKFGAISSVLNDILSRLDPPEAEVQIDRLITGRLQSLQTYVTQQLIRAAEIRASANLAATKMSECVLGQSKRVDFCGKGYHLMSFPQSAPHGVVFLHVTYVPAQEKNFTTAPAICHDGKAHFPREGVFVSNGTHWFVTQRNFYEPQIITTDNTFVSGNCDVVIGIVNNTVYDPLQPELDSFKEELDKYFKNHTSPDVDLGDISGINASVVNIQKEIDRLNEVAKNLNESLIDLQELGKYEQYIKWPWYIWLGFIAGLIAIVMVTIMLCCMTSCCSCLKGCCSCGSCCKFDEDDSEPVLKGVKLHYT

SEQ ID NO: 300 - protein, 1256 aa, synthetic construct
QCVNLITRTQSYTNSFTRGVYYPDKVFRSSVLHSTHDLFLPFFSNVTWFHAIHVSGTNGTKRFDNPALPFNDGVYFASTEKSNIIRGWIFGTTLDSKTQSLLIVNNATNVVIKVCEFQFCNDPFLDVYQKNNKSWMESEFRVYSSANNCTFEYVSQPFLMDLEGKEGNFKNLREFVFKNIDGYFKIYSKHTPINLERDLPQGFSALEPLVDLPIGINITRFQTLLALHRSYLTPVDSSSGWTAGAAAYYVGYLQPRTFLLKYNENGTITDAVDCALDPLSETKCTLKSFTVEKGIYQTSNFRVQPTESIVRFPNITNLCPFHEVFNATTFASVYAWNRKRISNCVADYSVIYNFAPFFAFKCYGVSPTKLNDLCFTNVYADSFVIRGNEVSQIAPGQTGNIADYNYKLPDDFTGCVIAWNSNKLDSKPSGNYNYLYRLLRKSKLKPFERDISTEIYQAGNKPCNGVAGPNCYSPLQSYGFRPTYGVGHQPYRVVVLSFELLHASATVCGPKKSTNLVKNKCVNFNFNGLTGTGVLTESNKKFLPFQQFGRDIADTTDAVRDPQTLEILDITPCSFGGVSVITPGTNTSNQVAVLYQGVNCTEVPVAIHADQLTPTWRVYSTGSNVFQTRAGCLIGAEYVNNSYECDIPIGAGICASYQTQTKSHQQAQSVASQSIIAYTMSLGAENSVAYSNNSIAIPTNFTISVTTEILPVSMTKTSVDCTMYICGDSTECSNLLLQYGSFCTQLKRALTGIAVEQDKNTQEVFAQVKQIYKTPPIKYFGGFNFSQILPDPSKPSKRSFIEDLLFNKVTLADAGFIKQYGDCLGDIAARDLICAQKFNGLTVLPPLLTDEMIAQYTSALLAGTITSGWTFGAGAALQIPFAMQMAYRFNGIGVTQNVLYENQKLIANQFNSAIGKIQDSLSSTASALGKLQDVVNHNAQALNTLVKQLSSKFGAISSVLNDILSRLDPPEAEVQIDRLITGRLQSLQTYVTQQLIRAAEIRASANLAATKMSECVLGQSKRVDFCGKGYHLMSFPQSAPHGVVFLHVTYVPAQEKNFTTAPAICHDGKAHFPREGVFVSNGTHWFVTQRNFYEPQIITTDNTFVSGNCDVVIGIVNNTVYDPLQPELDSFKEELDKYFKNHTSPDVDLGDISGINASVVNIQKEIDRLNEVAKNLNESLIDLQELGKYEQYIKWPWYIWLGFIAGLIAIVMVTIMLCCMTSCCSCLKGCCSCGSCCKFDEDDSEPVLKGVKLHYT

SEQ ID NO: 301 - protein, 1269 aa, synthetic construct
MFVFLVLLPLVSSQCVNLITRTQSYTNSFTRGVYYPDKVFRSSVLHSTHDLFLPFFSNVTWFHAIHVSGTNGTKRFDNPALPFNDGVYFASTEKSNIIRGWIFGTTLDSKTQSLLIVNNATNVVIKVCEFQFCNDPFLDVYQKNNKSWMESEFRVYSSANNCTFEYVSQPFLMDLEGKEGNFKNLREFVFKNIDGYFKIYSKHTPINLERDLPQGFSALEPLVDLPIGINITRFQTLLALHRSYLTPVDSSSGWTAGAAAYYVGYLQPRTFLLKYNENGTITDAVDCALDPLSETKCTLKSFTVEKGIYQTSNFRVQPTESIVRFPNITNLCPFHEVFNATTFASVYAWNRKRISNCVADYSVIYNFAPFFAFKCYGVSPTKLNDLCFTNVYADSFVIRGNEVSQIAPGQTGNIADYNYKLPDDFTGCVIAWNSNKLDSTPSGNYNYLYRLLRKSKLKPFERDISTEIYQAGNKPCNGVAGPNCYSPLQSYGFRPTYGVGHQPYRVVVLSFELLHAPATVCGPKKSTNLVKNKCVNFNFNGLTGTGVLTESNKKFLPFQQFGRDIADTTDAVRDPQTLEILDITPCSFGGVSVITPGTNTSNQVAVLYQGVNCTEVPVAIHADQLTPTWRVYSTGSNVFQTRAGCLIGAEYVNNSYECDIPIGAGICASYQTQTKSHRRARSVASQSIIAYTMSLGAENSVAYSNNSIAIPTNFTISVTTEILPVSMTKTSVDCTMYICGDSTECSNLLLQYGSFCTQLKRALTGIAVEQDKNTQEVFAQVKQIYKTPPIKYFGGFNFSQILPDPSKPSKRSFIEDLLFNKVTLADAGFIKQYGDCLGDIAARDLICAQKFNGLTVLPPLLTDEMIAQYTSALLAGTITSGWTFGAGAALQIPFAMQMAYRFNGIGVTQNVLYENQKLIANQFNSAIGKIQDSLSSTASALGKLQDVVNHNAQALNTLVKQLSSKFGAISSVLNDILSRLDKVEAEVQIDRLITGRLQSLQTYVTQQLIRAAEIRASANLAATKMSECVLGQSKRVDFCGKGYHLMSFPQSAPHGVVFLHVTYVPAQEKNFTTAPAICHDGKAHFPREGVFVSNGTHWFVTQRNFYEPQIITTDNTFVSGNCDVVIGIVNNTVYDPLQPELDSFKEELDKYFKNHTSPDVDLGDISGINASVVNIQKEIDRLNEVAKNLNESLIDLQELGKYEQYIKWPWYIWLGFIAGLIAIVMVTIMLCCMTSCCSCLKGCCSCGSCCKFDEDDSEPVLKGVKLHYT

SEQ ID NO: 302 - protein, 1256 aa, synthetic construct
QCVNLITRTQSYTNSFTRGVYYPDKVFRSSVLHSTHDLFLPFFSNVTWFHAIHVSGTNGTKRFDNPALPFNDGVYFASTEKSNIIRGWIFGTTLDSKTQSLLIVNNATNVVIKVCEFQFCNDPFLDVYQKNNKSWMESEFRVYSSANNCTFEYVSQPFLMDLEGKEGNFKNLREFVFKNIDGYFKIYSKHTPINLERDLPQGFSALEPLVDLPIGINITRFQTLLALHRSYLTPVDSSSGWTAGAAAYYVGYLQPRTFLLKYNENGTITDAVDCALDPLSETKCTLKSFTVEKGIYQTSNFRVQPTESIVRFPNITNLCPFHEVFNATTFASVYAWNRKRISNCVADYSVIYNFAPFFAFKCYGVSPTKLNDLCFTNVYADSFVIRGNEVSQIAPGQTGNIADYNYKLPDDFTGCVIAWNSNKLDSTPSGNYNYLYRLLRKSKLKPFERDISTEIYQAGNKPCNGVAGPNCYSPLQSYGFRPTYGVGHQPYRVVVLSFELLHAPATVCGPKKSTNLVKNKCVNFNFNGLTGTGVLTESNKKFLPFQQFGRDIADTTDAVRDPQTLEILDITPCSFGGVSVITPGTNTSNQVAVLYQGVNCTEVPVAIHADQLTPTWRVYSTGSNVFQTRAGCLIGAEYVNNSYECDIPIGAGICASYQTQTKSHRRARSVASQSIIAYTMSLGAENSVAYSNNSIAIPTNFTISVTTEILPVSMTKTSVDCTMYICGDSTECSNLLLQYGSFCTQLKRALTGIAVEQDKNTQEVFAQVKQIYKTPPIKYFGGFNFSQILPDPSKPSKRSFIEDLLFNKVTLADAGFIKQYGDCLGDIAARDLICAQKFNGLTVLPPLLTDEMIAQYTSALLAGTITSGWTFGAGAALQIPFAMQMAYRFNGIGVTQNVLYENQKLIANQFNSAIGKIQDSLSSTASALGKLQDVVNHNAQALNTLVKQLSSKFGAISSVLNDILSRLDKVEAEVQIDRLITGRLQSLQTYVTQQLIRAAEIRASANLAATKMSECVLGQSKRVDFCGKGYHLMSFPQSAPHGVVFLHVTYVPAQEKNFTTAPAICHDGKAHFPREGVFVSNGTHWFVTQRNFYEPQIITTDNTFVSGNCDVVIGIVNNTVYDPLQPELDSFKEELDKYFKNHTSPDVDLGDISGINASVVNIQKEIDRLNEVAKNLNESLIDLQELGKYEQYIKWPWYIWLGFIAGLIAIVMVTIMLCCMTSCCSCLKGCCSCGSCCKFDEDDSEPVLKGVKLHYT

SEQ ID NO: 303 - protein, 1269 aa, synthetic construct
MFVFLVLLPLVSSQCVNLITRTQSYTNSFTRGVYYPDKVFRSSVLHSTHDLFLPFFSNVTWFHAIHVSGTNGTKRFDNPALPFNDGVYFASTEKSNIIRGWIFGTTLDSKTQSLLIVNNATNVVIKVCEFQFCNDPFLDVYQKNNKSWMESEFRVYSSANNCTFEYVSQPFLMDLEGKEGNFKNLREFVFKNIDGYFKIYSKHTPINLERDLPQGFSALEPLVDLPIGINITRFQTLLALHRSYLTPVDSSSGWTAGAAAYYVGYLQPRTFLLKYNENGTITDAVDCALDPLSETKCTLKSFTVEKGIYQTSNFRVQPTESIVRFPNITNLCPFHEVFNATTFASVYAWNRKRISNCVADYSVIYNFAPFFAFKCYGVSPTKLNDLCFTNVYADSFVIRGNEVSQIAPGQTGNIADYNYKLPDDFTGCVIAWNSNKLDSTPSGNYNYLYRLLRKSKLKPFERDISTEIYQAGNKPCNGVAGPNCYSPLQSYGFRPTYGVGHQPYRVVVLSFELLHAPATVCGPKKSTNLVKNKCVNFNFNGLTGTGVLTESNKKFLPFQQFGRDIADTTDAVRDPQTLEILDITPCSFGGVSVITPGTNTSNQVAVLYQGVNCTEVPVAIHADQLTPTWRVYSTGSNVFQTRAGCLIGAEYVNNSYECDIPIGAGICASYQTQTKSHQQAQSVASQSIIAYTMSLGAENSVAYSNNSIAIPTNFTISVTTEILPVSMTKTSVDCTMYICGDSTECSNLLLQYGSFCTQLKRALTGIAVEQDKNTQEVFAQVKQIYKTPPIKYFGGFNFSQILPDPSKPSKRSFIEDLLFNKVTLADAGFIKQYGDCLGDIAARDLICAQKFNGLTVLPPLLTDEMIAQYTSALLAGTITSGWTFGAGAALQIPFAMQMAYRFNGIGVTQNVLYENQKLIANQFNSAIGKIQDSLSSTASALGKLQDVVNHNAQALNTLVKQLSSKFGAISSVLNDILSRLDPPEAEVQIDRLITGRLQSLQTYVTQQLIRAAEIRASANLAATKMSECVLGQSKRVDFCGKGYHLMSFPQSAPHGVVFLHVTYVPAQEKNFTTAPAICHDGKAHFPREGVFVSNGTHWFVTQRNFYEPQIITTDNTFVSGNCDVVIGIVNNTVYDPLQPELDSFKEELDKYFKNHTSPDVDLGDISGINASVVNIQKEIDRLNEVAKNLNESLIDLQELGKYEQYIKWPWYIWLGFIAGLIAIVMVTIMLCCMTSCCSCLKGCCSCGSCCKFDEDDSEPVLKGVKLHYT

SEQ ID NO: 304 - protein, 1256 aa, synthetic construct
QCVNLITRTQSYTNSFTRGVYYPDKVFRSSVLHSTHDLFLPFFSNVTWFHAIHVSGTNGTKRFDNPALPFNDGVYFASTEKSNIIRGWIFGTTLDSKTQSLLIVNNATNVVIKVCEFQFCNDPFLDVYQKNNKSWMESEFRVYSSANNCTFEYVSQPFLMDLEGKEGNFKNLREFVFKNIDGYFKIYSKHTPINLERDLPQGFSALEPLVDLPIGINITRFQTLLALHRSYLTPVDSSSGWTAGAAAYYVGYLQPRTFLLKYNENGTITDAVDCALDPLSETKCTLKSFTVEKGIYQTSNFRVQPTESIVRFPNITNLCPFHEVFNATTFASVYAWNRKRISNCVADYSVIYNFAPFFAFKCYGVSPTKLNDLCFTNVYADSFVIRGNEVSQIAPGQTGNIADYNYKLPDDFTGCVIAWNSNKLDSTPSGNYNYLYRLLRKSKLKPFERDISTEIYQAGNKPCNGVAGPNCYSPLQSYGFRPTYGVGHQPYRVVVLSFELLHAPATVCGPKKSTNLVKNKCVNFNFNGLTGTGVLTESNKKFLPFQQFGRDIADTTDAVRDPQTLEILDITPCSFGGVSVITPGTNTSNQVAVLYQGVNCTEVPVAIHADQLTPTWRVYSTGSNVFQTRAGCLIGAEYVNNSYECDIPIGAGICASYQTQTKSHQQAQSVASQSIIAYTMSLGAENSVAYSNNSIAIPTNFTISVTTEILPVSMTKTSVDCTMYICGDSTECSNLLLQYGSFCTQLKRALTGIAVEQDKNTQEVFAQVKQIYKTPPIKYFGGFNFSQILPDPSKPSKRSFIEDLLFNKVTLADAGFIKQYGDCLGDIAARDLICAQKFNGLTVLPPLLTDEMIAQYTSALLAGTITSGWTFGAGAALQIPFAMQMAYRFNGIGVTQNVLYENQKLIANQFNSAIGKIQDSLSSTASALGKLQDVVNHNAQALNTLVKQLSSKFGAISSVLNDILSRLDPPEAEVQIDRLITGRLQSLQTYVTQQLIRAAEIRASANLAATKMSECVLGQSKRVDFCGKGYHLMSFPQSAPHGVVFLHVTYVPAQEKNFTTAPAICHDGKAHFPREGVFVSNGTHWFVTQRNFYEPQIITTDNTFVSGNCDVVIGIVNNTVYDPLQPELDSFKEELDKYFKNHTSPDVDLGDISGINASVVNIQKEIDRLNEVAKNLNESLIDLQELGKYEQYIKWPWYIWLGFIAGLIAIVMVTIMLCCMTSCCSCLKGCCSCGSCCKFDEDDSEPVLKGVKLHYT

SEQ ID NO: 305 - protein, 1269 aa, synthetic construct
MFVFLVLLPLVSSQCVNLITRTQSYTNSFTRGVYYPDKVFRSSVLHSTHDLFLPFFSNVTWFHAIHVSGTNGTKRFDNPALPFNDGVYFASTEKSNIIRGWIFGTTLDSKTQSLLIVNNATNVVIKVCEFQFCNDPFLDVYQKNNKSWMESEFRVYSSANNCTFEYVSQPFLMDLEGKEGNFKNLREFVFKNIDGYFKIYSKHTPINLERDLPQGFSALEPLVDLPIGINITRFQTLLALHRSYLTPVDSSSGWTAGAAAYYVGYLQPRTFLLKYNENGTITDAVDCALDPLSETKCTLKSFTVEKGIYQTSNFRVQPTESIVRFPNITNLCPFHEVFNATTFASVYAWNRKRISNCVADYSVIYNFAPFFAFKCYGVSPTKLNDLCFTNVYADSFVIRGNEVSQIAPGQTGNIADYNYKLPDDFTGCVIAWNSNKLDSKPSGNYNYLYRLLRKSKLKPFERDISTEIYQAGNKPCNGVAGSNCYSPLQSYGFRPTYGVGHQPYRVVVLSFELLHAPATVCGPKKSTNLVKNKCVNFNFNGLTGTGVLTESNKKFLPFQQFGRDIADTTDAVRDPQTLEILDITPCSFGGVSVITPGTNTSNQVAVLYQGVNCTEVPVAIHADQLTPTWRVYSTGSNVFQTRAGCLIGAEYVNNSYECDIPIGAGICASYQTQTKSHRRARSVASQSIIAYTMSLGAENSVAYSNNSIAIPTNFTISVTTEILPVSMTKTSVDCTMYICGDSTECSNLLLQYGSFCTQLKRALTGIAVEQDKNTQEVFAQVKQIYKTPPIKYFGGFNFSQILPDPSKPSKRSFIEDLLFNKVTLADAGFIKQYGDCLGDIAARDLICAQKFNGLTVLPPLLTDEMIAQYTSALLAGTITSGWTFGAGAALQIPFAMQMAYRFNGIGVTQNVLYENQKLIANQFNSAIGKIQDSLSSTASALGKLQDVVNHNAQALNTLVKQLSSKFGAISSVLNDILSRLDKVEAEVQIDRLITGRLQSLQTYVTQQLIRAAEIRASANLAATKMSECVLGQSKRVDFCGKGYHLMSFPQSAPHGVVFLHVTYVPAQEKNFTTAPAICHDGKAHFPREGVFVSNGTHWFVTQRNFYEPQIITTDNTFVSGNCDVVIGIVNNTVYDPLQPELDSFKEELDKYFKNHTSPDVDLGDISGINASVVNIQKEIDRLNEVAKNLNESLIDLQELGKYEQYIKWPWYIWLGFIAGLIAIVMVTIMLCCMTSCCSCLKGCCSCGSCCKFDEDDSEPVLKGVKLHYT

SEQ ID NO: 306 - protein, 1256 aa, synthetic construct
QCVNLITRTQSYTNSFTRGVYYPDKVFRSSVLHSTHDLFLPFFSNVTWFHAIHVSGTNGTKRFDNPALPFNDGVYFASTEKSNIIRGWIFGTTLDSKTQSLLIVNNATNVVIKVCEFQFCNDPFLDVYQKNNKSWMESEFRVYSSANNCTFEYVSQPFLMDLEGKEGNFKNLREFVFKNIDGYFKIYSKHTPINLERDLPQGFSALEPLVDLPIGINITRFQTLLALHRSYLTPVDSSSGWTAGAAAYYVGYLQPRTFLLKYNENGTITDAVDCALDPLSETKCTLKSFTVEKGIYQTSNFRVQPTESIVRFPNITNLCPFHEVFNATTFASVYAWNRKRISNCVADYSVIYNFAPFFAFKCYGVSPTKLNDLCFTNVYADSFVIRGNEVSQIAPGQTGNIADYNYKLPDDFTGCVIAWNSNKLDSKPSGNYNYLYRLLRKSKLKPFERDISTEIYQAGNKPCNGVAGSNCYSPLQSYGFRPTYGVGHQPYRVVVLSFELLHAPATVCGPKKSTNLVKNKCVNFNFNGLTGTGVLTESNKKFLPFQQFGRDIADTTDAVRDPQTLEILDITPCSFGGVSVITPGTNTSNQVAVLYQGVNCTEVPVAIHADQLTPTWRVYSTGSNVFQTRAGCLIGAEYVNNSYECDIPIGAGICASYQTQTKSHRRARSVASQSIIAYTMSLGAENSVAYSNNSIAIPTNFTISVTTEILPVSMTKTSVDCTMYICGDSTECSNLLLQYGSFCTQLKRALTGIAVEQDKNTQEVFAQVKQIYKTPPIKYFGGFNFSQILPDPSKPSKRSFIEDLLFNKVTLADAGFIKQYGDCLGDIAARDLICAQKFNGLTVLPPLLTDEMIAQYTSALLAGTITSGWTFGAGAALQIPFAMQMAYRFNGIGVTQNVLYENQKLIANQFNSAIGKIQDSLSSTASALGKLQDVVNHNAQALNTLVKQLSSKFGAISSVLNDILSRLDKVEAEVQIDRLITGRLQSLQTYVTQQLIRAAEIRASANLAATKMSECVLGQSKRVDFCGKGYHLMSFPQSAPHGVVFLHVTYVPAQEKNFTTAPAICHDGKAHFPREGVFVSNGTHWFVTQRNFYEPQIITTDNTFVSGNCDVVIGIVNNTVYDPLQPELDSFKEELDKYFKNHTSPDVDLGDISGINASVVNIQKEIDRLNEVAKNLNESLIDLQELGKYEQYIKWPWYIWLGFIAGLIAIVMVTIMLCCMTSCCSCLKGCCSCGSCCKFDEDDSEPVLKGVKLHYT

SEQ ID NO: 307 - protein, 1269 aa, synthetic construct
MFVFLVLLPLVSSQCVNLITRTQSYTNSFTRGVYYPDKVFRSSVLHSTHDLFLPFFSNVTWFHAIHVSGTNGTKRFDNPALPFNDGVYFASTEKSNIIRGWIFGTTLDSKTQSLLIVNNATNVVIKVCEFQFCNDPFLDVYQKNNKSWMESEFRVYSSANNCTFEYVSQPFLMDLEGKEGNFKNLREFVFKNIDGYFKIYSKHTPINLERDLPQGFSALEPLVDLPIGINITRFQTLLALHRSYLTPVDSSSGWTAGAAAYYVGYLQPRTFLLKYNENGTITDAVDCALDPLSETKCTLKSFTVEKGIYQTSNFRVQPTESIVRFPNITNLCPFHEVFNATTFASVYAWNRKRISNCVADYSVIYNFAPFFAFKCYGVSPTKLNDLCFTNVYADSFVIRGNEVSQIAPGQTGNIADYNYKLPDDFTGCVIAWNSNKLDSKPSGNYNYLYRLLRKSKLKPFERDISTEIYQAGNKPCNGVAGSNCYSPLQSYGFRPTYGVGHQPYRVVVLSFELLHAPATVCGPKKSTNLVKNKCVNFNFNGLTGTGVLTESNKKFLPFQQFGRDIADTTDAVRDPQTLEILDITPCSFGGVSVITPGTNTSNQVAVLYQGVNCTEVPVAIHADQLTPTWRVYSTGSNVFQTRAGCLIGAEYVNNSYECDIPIGAGICASYQTQTKSHQQAQSVASQSIIAYTMSLGAENSVAYSNNSIAIPTNFTISVTTEILPVSMTKTSVDCTMYICGDSTECSNLLLQYGSFCTQLKRALTGIAVEQDKNTQEVFAQVKQIYKTPPIKYFGGFNFSQILPDPSKPSKRSFIEDLLFNKVTLADAGFIKQYGDCLGDIAARDLICAQKFNGLTVLPPLLTDEMIAQYTSALLAGTITSGWTFGAGAALQIPFAMQMAYRFNGIGVTQNVLYENQKLIANQFNSAIGKIQDSLSSTASALGKLQDVVNHNAQALNTLVKQLSSKFGAISSVLNDILSRLDPPEAEVQIDRLITGRLQSLQTYVTQQLIRAAEIRASANLAATKMSECVLGQSKRVDFCGKGYHLMSFPQSAPHGVVFLHVTYVPAQEKNFTTAPAICHDGKAHFPREGVFVSNGTHWFVTQRNFYEPQIITTDNTFVSGNCDVVIGIVNNTVYDPLQPELDSFKEELDKYFKNHTSPDVDLGDISGINASVVNIQKEIDRLNEVAKNLNESLIDLQELGKYEQYIKWPWYIWLGFIAGLIAIVMVTIMLCCMTSCCSCLKGCCSCGSCCKFDEDDSEPVLKGVKLHYT

SEQ ID NO: 308 - protein, 1256 aa, synthetic construct
QCVNLITRTQSYTNSFTRGVYYPDKVFRSSVLHSTHDLFLPFFSNVTWFHAIHVSGTNGTKRFDNPALPFNDGVYFASTEKSNIIRGWIFGTTLDSKTQSLLIVNNATNVVIKVCEFQFCNDPFLDVYQKNNKSWMESEFRVYSSANNCTFEYVSQPFLMDLEGKEGNFKNLREFVFKNIDGYFKIYSKHTPINLERDLPQGFSALEPLVDLPIGINITRFQTLLALHRSYLTPVDSSSGWTAGAAAYYVGYLQPRTFLLKYNENGTITDAVDCALDPLSETKCTLKSFTVEKGIYQTSNFRVQPTESIVRFPNITNLCPFHEVFNATTFASVYAWNRKRISNCVADYSVIYNFAPFFAFKCYGVSPTKLNDLCFTNVYADSFVIRGNEVSQIAPGQTGNIADYNYKLPDDFTGCVIAWNSNKLDSKPSGNYNYLYRLLRKSKLKPFERDISTEIYQAGNKPCNGVAGSNCYSPLQSYGFRPTYGVGHQPYRVVVLSFELLHAPATVCGPKKSTNLVKNKCVNFNFNGLTGTGVLTESNKKFLPFQQFGRDIADTTDAVRDPQTLEILDITPCSFGGVSVITPGTNTSNQVAVLYQGVNCTEVPVAIHADQLTPTWRVYSTGSNVFQTRAGCLIGAEYVNNSYECDIPIGAGICASYQTQTKSHQQAQSVASQSIIAYTMSLGAENSVAYSNNSIAIPTNFTISVTTEILPVSMTKTSVDCTMYICGDSTECSNLLLQYGSFCTQLKRALTGIAVEQDKNTQEVFAQVKQIYKTPPIKYFGGFNFSQILPDPSKPSKRSFIEDLLFNKVTLADAGFIKQYGDCLGDIAARDLICAQKFNGLTVLPPLLTDEMIAQYTSALLAGTITSGWTFGAGAALQIPFAMQMAYRFNGIGVTQNVLYENQKLIANQFNSAIGKIQDSLSSTASALGKLQDVVNHNAQALNTLVKQLSSKFGAISSVLNDILSRLDPPEAEVQIDRLITGRLQSLQTYVTQQLIRAAEIRASANLAATKMSECVLGQSKRVDFCGKGYHLMSFPQSAPHGVVFLHVTYVPAQEKNFTTAPAICHDGKAHFPREGVFVSNGTHWFVTQRNFYEPQIITTDNTFVSGNCDVVIGIVNNTVYDPLQPELDSFKEELDKYFKNHTSPDVDLGDISGINASVVNIQKEIDRLNEVAKNLNESLIDLQELGKYEQYIKWPWYIWLGFIAGLIAIVMVTIMLCCMTSCCSCLKGCCSCGSCCKFDEDDSEPVLKGVKLHYT

SEQ ID NO: 309 - protein, 1269 aa, Severe acute respiratory syndrome-related coronavirus
MFVFLVLLPLVSSQCVNLITRTQSYTNSFTRGVYYPDKVFRSSVLHSTQDLFLPFFSNVTWFHAIHVSGTNGTKRFDNPALPFNDGVYFASTEKSNIIRGWIFGTTLDSKTQSLLIVNNATNVVIKVCEFQFCNDPFLDVYQKNNKSWMESEFRVYSSANNCTFEYVSQPFLMDLVGKEGNFKNLREFVFKNIDGYFKIYSKHTPINLERDLPQGFSALEPLVDLPIGINITRFQTLLALHRSYLTPVDSSSGWTAGAAAYYVGYLQPRTFLLKYNENGTITDAVDCALDPLSETKCTLKSFTVEKGIYQTSNFRVQPTESIVRFPNITNLCPFHEVFNATTFASVYAWNRKRISNCVADYSVIYNFAPFFAFKCYGVSPTKLNDLCFTNVYADSFVIRGNEVSQIAPGQTGNIADYNYKLPDDFTGCVIAWNSNKLDSKPSGNYNYLYRLLRKSKLKPFERDISTEIYQAGNRPCNGVAGPNCYSPLQSYGFRPTYGVGHQPYRVVVLSFELLHAPATVCGPKKSTNLVKNKCVNFNFNGLTGTGVLTESNKKFLPFQQFGRDIADTTDAVRDPQTLEILDITPCSFGGVSVITPGTNTSNQVAVLYQGVNCTEVPVAIHADQLTPTWRVYSTGSNVFQTRAGCLIGAEYVNNSYECDIPIGAGICASYQTQTKSHRRARSVASQSIIAYTMSLGAENSVAYSNNSIAIPTNFTISVTTEILPVSMTKTSVDCTMYICGDSTECSNLLLQYGSFCTQLKRALTGIAVEQDKNTQEVFAQVKQIYKTPPIKYFGGFNFSQILPDPSKPSKRSFIEDLLFNKVTLADAGFIKQYGDCLGDIAARDLICAQKFNGLTVLPPLLTDEMIAQYTSALLAGTITSGWTFGAGAALQIPFAMQMAYRFNGIGVTQNVLYENQKLIANQFNSAIGKIQDSLSSTASALGKLQDVVNHNAQALNTLVKQLSSKFGAISSVLNDILSRLDKVEAEVQIDRLITGRLQSLQTYVTQQLIRAAEIRASANLAATKMSECVLGQSKRVDFCGKGYHLMSFPQSAPHGVVFLHVTYVPAQEKNFTTAPAICHDGKAHFPREGVFVSNGTHWFVTQRNFYEPQIITTDNTFVSGNCDVVIGIVNNTVYDPLQPELDSFKEELDKYFKNHTSPDVDLGDISGINASVVNIQKEIDRLNEVAKNLNESLIDLQELGKYEQYIKWPWYIWLGFIAGLIAIVMVTIMLCCMTSCCSCLKGCCSCGSCCKFDEDDSEPVLKGVKLHYT

SEQ ID NO: 310 - protein, 1256 aa, Severe acute respiratory syndrome-related coronavirus
QCVNLITRTQSYTNSFTRGVYYPDKVFRSSVLHSTQDLFLPFFSNVTWFHAIHVSGTNGTKRFDNPALPFNDGVYFASTEKSNIIRGWIFGTTLDSKTQSLLIVNNATNVVIKVCEFQFCNDPFLDVYQKNNKSWMESEFRVYSSANNCTFEYVSQPFLMDLVGKEGNFKNLREFVFKNIDGYFKIYSKHTPINLERDLPQGFSALEPLVDLPIGINITRFQTLLALHRSYLTPVDSSSGWTAGAAAYYVGYLQPRTFLLKYNENGTITDAVDCALDPLSETKCTLKSFTVEKGIYQTSNFRVQPTESIVRFPNITNLCPFHEVFNATTFASVYAWNRKRISNCVADYSVIYNFAPFFAFKCYGVSPTKLNDLCFTNVYADSFVIRGNEVSQIAPGQTGNIADYNYKLPDDFTGCVIAWNSNKLDSKPSGNYNYLYRLLRKSKLKPFERDISTEIYQAGNRPCNGVAGPNCYSPLQSYGFRPTYGVGHQPYRVVVLSFELLHAPATVCGPKKSTNLVKNKCVNFNFNGLTGTGVLTESNKKFLPFQQFGRDIADTTDAVRDPQTLEILDITPCSFGGVSVITPGTNTSNQVAVLYQGVNCTEVPVAIHADQLTPTWRVYSTGSNVFQTRAGCLIGAEYVNNSYECDIPIGAGICASYQTQTKSHRRARSVASQSIIAYTMSLGAENSVAYSNNSIAIPTNFTISVTTEILPVSMTKTSVDCTMYICGDSTECSNLLLQYGSFCTQLKRALTGIAVEQDKNTQEVFAQVKQIYKTPPIKYFGGFNFSQILPDPSKPSKRSFIEDLLFNKVTLADAGFIKQYGDCLGDIAARDLICAQKFNGLTVLPPLLTDEMIAQYTSALLAGTITSGWTFGAGAALQIPFAMQMAYRFNGIGVTQNVLYENQKLIANQFNSAIGKIQDSLSSTASALGKLQDVVNHNAQALNTLVKQLSSKFGAISSVLNDILSRLDKVEAEVQIDRLITGRLQSLQTYVTQQLIRAAEIRASANLAATKMSECVLGQSKRVDFCGKGYHLMSFPQSAPHGVVFLHVTYVPAQEKNFTTAPAICHDGKAHFPREGVFVSNGTHWFVTQRNFYEPQIITTDNTFVSGNCDVVIGIVNNTVYDPLQPELDSFKEELDKYFKNHTSPDVDLGDISGINASVVNIQKEIDRLNEVAKNLNESLIDLQELGKYEQYIKWPWYIWLGFIAGLIAIVMVTIMLCCMTSCCSCLKGCCSCGSCCKFDEDDSEPVLKGVKLHYT

SEQ ID NO: 311 - protein, 1269 aa, synthetic construct
MFVFLVLLPLVSSQCVNLITRTQSYTNSFTRGVYYPDKVFRSSVLHSTQDLFLPFFSNVTWFHAIHVSGTNGTKRFDNPALPFNDGVYFASTEKSNIIRGWIFGTTLDSKTQSLLIVNNATNVVIKVCEFQFCNDPFLDVYQKNNKSWMESEFRVYSSANNCTFEYVSQPFLMDLVGKEGNFKNLREFVFKNIDGYFKIYSKHTPINLERDLPQGFSALEPLVDLPIGINITRFQTLLALHRSYLTPVDSSSGWTAGAAAYYVGYLQPRTFLLKYNENGTITDAVDCALDPLSETKCTLKSFTVEKGIYQTSNFRVQPTESIVRFPNITNLCPFHEVFNATTFASVYAWNRKRISNCVADYSVIYNFAPFFAFKCYGVSPTKLNDLCFTNVYADSFVIRGNEVSQIAPGQTGNIADYNYKLPDDFTGCVIAWNSNKLDSKPSGNYNYLYRLLRKSKLKPFERDISTEIYQAGNRPCNGVAGPNCYSPLQSYGFRPTYGVGHQPYRVVVLSFELLHAPATVCGPKKSTNLVKNKCVNFNFNGLTGTGVLTESNKKFLPFQQFGRDIADTTDAVRDPQTLEILDITPCSFGGVSVITPGTNTSNQVAVLYQGVNCTEVPVAIHADQLTPTWRVYSTGSNVFQTRAGCLIGAEYVNNSYECDIPIGAGICASYQTQTKSHQQAQSVASQSIIAYTMSLGAENSVAYSNNSIAIPTNFTISVTTEILPVSMTKTSVDCTMYICGDSTECSNLLLQYGSFCTQLKRALTGIAVEQDKNTQEVFAQVKQIYKTPPIKYFGGFNFSQILPDPSKPSKRSFIEDLLFNKVTLADAGFIKQYGDCLGDIAARDLICAQKFNGLTVLPPLLTDEMIAQYTSALLAGTITSGWTFGAGAALQIPFAMQMAYRFNGIGVTQNVLYENQKLIANQFNSAIGKIQDSLSSTASALGKLQDVVNHNAQALNTLVKQLSSKFGAISSVLNDILSRLDPPEAEVQIDRLITGRLQSLQTYVTQQLIRAAEIRASANLAATKMSECVLGQSKRVDFCGKGYHLMSFPQSAPHGVVFLHVTYVPAQEKNFTTAPAICHDGKAHFPREGVFVSNGTHWFVTQRNFYEPQIITTDNTFVSGNCDVVIGIVNNTVYDPLQPELDSFKEELDKYFKNHTSPDVDLGDISGINASVVNIQKEIDRLNEVAKNLNESLIDLQELGKYEQYIKWPWYIWLGFIAGLIAIVMVTIMLCCMTSCCSCLKGCCSCGSCCKFDEDDSEPVLKGVKLHYT

SEQ ID NO: 312 - protein, 1256 aa, synthetic construct
QCVNLITRTQSYTNSFTRGVYYPDKVFRSSVLHSTQDLFLPFFSNVTWFHAIHVSGTNGTKRFDNPALPFNDGVYFASTEKSNIIRGWIFGTTLDSKTQSLLIVNNATNVVIKVCEFQFCNDPFLDVYQKNNKSWMESEFRVYSSANNCTFEYVSQPFLMDLVGKEGNFKNLREFVFKNIDGYFKIYSKHTPINLERDLPQGFSALEPLVDLPIGINITRFQTLLALHRSYLTPVDSSSGWTAGAAAYYVGYLQPRTFLLKYNENGTITDAVDCALDPLSETKCTLKSFTVEKGIYQTSNFRVQPTESIVRFPNITNLCPFHEVFNATTFASVYAWNRKRISNCVADYSVIYNFAPFFAFKCYGVSPTKLNDLCFTNVYADSFVIRGNEVSQIAPGQTGNIADYNYKLPDDFTGCVIAWNSNKLDSKPSGNYNYLYRLLRKSKLKPFERDISTEIYQAGNRPCNGVAGPNCYSPLQSYGFRPTYGVGHQPYRVVVLSFELLHAPATVCGPKKSTNLVKNKCVNFNFNGLTGTGVLTESNKKFLPFQQFGRDIADTTDAVRDPQTLEILDITPCSFGGVSVITPGTNTSNQVAVLYQGVNCTEVPVAIHADQLTPTWRVYSTGSNVFQTRAGCLIGAEYVNNSYECDIPIGAGICASYQTQTKSHQQAQSVASQSIIAYTMSLGAENSVAYSNNSIAIPTNFTISVTTEILPVSMTKTSVDCTMYICGDSTECSNLLLQYGSFCTQLKRALTGIAVEQDKNTQEVFAQVKQIYKTPPIKYFGGFNFSQILPDPSKPSKRSFIEDLLFNKVTLADAGFIKQYGDCLGDIAARDLICAQKFNGLTVLPPLLTDEMIAQYTSALLAGTITSGWTFGAGAALQIPFAMQMAYRFNGIGVTQNVLYENQKLIANQFNSAIGKIQDSLSSTASALGKLQDVVNHNAQALNTLVKQLSSKFGAISSVLNDILSRLDPPEAEVQIDRLITGRLQSLQTYVTQQLIRAAEIRASANLAATKMSECVLGQSKRVDFCGKGYHLMSFPQSAPHGVVFLHVTYVPAQEKNFTTAPAICHDGKAHFPREGVFVSNGTHWFVTQRNFYEPQIITTDNTFVSGNCDVVIGIVNNTVYDPLQPELDSFKEELDKYFKNHTSPDVDLGDISGINASVVNIQKEIDRLNEVAKNLNESLIDLQELGKYEQYIKWPWYIWLGFIAGLIAIVMVTIMLCCMTSCCSCLKGCCSCGSCCKFDEDDSEPVLKGVKLHYT

SEQ ID NO: 313 - protein, 1269 aa, synthetic construct
MFVFLVLLPLVSSQCVNLITRTQSYTNSFTRGVYYPDKVFRSSVLHSTQDLFLPFFSNVTWFHAIHVSGTNGTKRFDNPALPFNDGVYFASTEKSNIIRGWIFGTTLDSKTQSLLIVNNATNVVIKVCEFQFCNDPFLDVYQKNNKSWMESEFRVYSSANNCTFEYVSQPFLMDLVGKEGNFKNLREFVFKNIDGYFKIYSKHTPINLERDLPQGFSALEPLVDLPIGINITRFQTLLALHRSYLTPVDSSSGWTAGAAAYYVGYLQPRTFLLKYNENGTITDAVDCALDPLSETKCTLKSFTVEKGIYQTSNFRVQPTESIVRFPNITNLCPFHEVFNATTFASVYAWNRKRISNCVADYSVIYNFAPFFAFKCYGVSPTKLNDLCFTNVYADSFVIRGNEVSQIAPGQTGNIADYNYKLPDDFTGCVIAWNSNKLDSKPSGNYNYLYRLLRKSKLKPFERDISTEIYQAGNRPCNGVAGPNCYSPLQSYGFRPTYGVGHQPYRVVVLSFELLHASATVCGPKKSTNLVKNKCVNFNFNGLTGTGVLTESNKKFLPFQQFGRDIADTTDAVRDPQTLEILDITPCSFGGVSVITPGTNTSNQVAVLYQGVNCTEVPVAIHADQLTPTWRVYSTGSNVFQTRAGCLIGAEYVNNSYECDIPIGAGICASYQTQTKSHRRARSVASQSIIAYTMSLGAENSVAYSNNSIAIPTNFTISVTTEILPVSMTKTSVDCTMYICGDSTECSNLLLQYGSFCTQLKRALTGIAVEQDKNTQEVFAQVKQIYKTPPIKYFGGFNFSQILPDPSKPSKRSFIEDLLFNKVTLADAGFIKQYGDCLGDIAARDLICAQKFNGLTVLPPLLTDEMIAQYTSALLAGTITSGWTFGAGAALQIPFAMQMAYRFNGIGVTQNVLYENQKLIANQFNSAIGKIQDSLSSTASALGKLQDVVNHNAQALNTLVKQLSSKFGAISSVLNDILSRLDKVEAEVQIDRLITGRLQSLQTYVTQQLIRAAEIRASANLAATKMSECVLGQSKRVDFCGKGYHLMSFPQSAPHGVVFLHVTYVPAQEKNFTTAPAICHDGKAHFPREGVFVSNGTHWFVTQRNFYEPQIITTDNTFVSGNCDVVIGIVNNTVYDPLQPELDSFKEELDKYFKNHTSPDVDLGDISGINASVVNIQKEIDRLNEVAKNLNESLIDLQELGKYEQYIKWPWYIWLGFIAGLIAIVMVTIMLCCMTSCCSCLKGCCSCGSCCKFDEDDSEPVLKGVKLHYT

SEQ ID NO: 314 - protein, 1256 aa, synthetic construct
QCVNLITRTQSYTNSFTRGVYYPDKVFRSSVLHSTQDLFLPFFSNVTWFHAIHVSGTNGTKRFDNPALPFNDGVYFASTEKSNIIRGWIFGTTLDSKTQSLLIVNNATNVVIKVCEFQFCNDPFLDVYQKNNKSWMESEFRVYSSANNCTFEYVSQPFLMDLVGKEGNFKNLREFVFKNIDGYFKIYSKHTPINLERDLPQGFSALEPLVDLPIGINITRFQTLLALHRSYLTPVDSSSGWTAGAAAYYVGYLQPRTFLLKYNENGTITDAVDCALDPLSETKCTLKSFTVEKGIYQTSNFRVQPTESIVRFPNITNLCPFHEVFNATTFASVYAWNRKRISNCVADYSVIYNFAPFFAFKCYGVSPTKLNDLCFTNVYADSFVIRGNEVSQIAPGQTGNIADYNYKLPDDFTGCVIAWNSNKLDSKPSGNYNYLYRLLRKSKLKPFERDISTEIYQAGNRPCNGVAGPNCYSPLQSYGFRPTYGVGHQPYRVVVLSFELLHASATVCGPKKSTNLVKNKCVNFNFNGLTGTGVLTESNKKFLPFQQFGRDIADTTDAVRDPQTLEILDITPCSFGGVSVITPGTNTSNQVAVLYQGVNCTEVPVAIHADQLTPTWRVYSTGSNVFQTRAGCLIGAEYVNNSYECDIPIGAGICASYQTQTKSHRRARSVASQSIIAYTMSLGAENSVAYSNNSIAIPTNFTISVTTEILPVSMTKTSVDCTMYICGDSTECSNLLLQYGSFCTQLKRALTGIAVEQDKNTQEVFAQVKQIYKTPPIKYFGGFNFSQILPDPSKPSKRSFIEDLLFNKVTLADAGFIKQYGDCLGDIAARDLICAQKFNGLTVLPPLLTDEMIAQYTSALLAGTITSGWTFGAGAALQIPFAMQMAYRFNGIGVTQNVLYENQKLIANQFNSAIGKIQDSLSSTASALGKLQDVVNHNAQALNTLVKQLSSKFGAISSVLNDILSRLDKVEAEVQIDRLITGRLQSLQTYVTQQLIRAAEIRASANLAATKMSECVLGQSKRVDFCGKGYHLMSFPQSAPHGVVFLHVTYVPAQEKNFTTAPAICHDGKAHFPREGVFVSNGTHWFVTQRNFYEPQIITTDNTFVSGNCDVVIGIVNNTVYDPLQPELDSFKEELDKYFKNHTSPDVDLGDISGINASVVNIQKEIDRLNEVAKNLNESLIDLQELGKYEQYIKWPWYIWLGFIAGLIAIVMVTIMLCCMTSCCSCLKGCCSCGSCCKFDEDDSEPVLKGVKLHYT

SEQ ID NO: 315 - protein, 1269 aa, synthetic construct
MFVFLVLLPLVSSQCVNLITRTQSYTNSFTRGVYYPDKVFRSSVLHSTQDLFLPFFSNVTWFHAIHVSGTNGTKRFDNPALPFNDGVYFASTEKSNIIRGWIFGTTLDSKTQSLLIVNNATNVVIKVCEFQFCNDPFLDVYQKNNKSWMESEFRVYSSANNCTFEYVSQPFLMDLVGKEGNFKNLREFVFKNIDGYFKIYSKHTPINLERDLPQGFSALEPLVDLPIGINITRFQTLLALHRSYLTPVDSSSGWTAGAAAYYVGYLQPRTFLLKYNENGTITDAVDCALDPLSETKCTLKSFTVEKGIYQTSNFRVQPTESIVRFPNITNLCPFHEVFNATTFASVYAWNRKRISNCVADYSVIYNFAPFFAFKCYGVSPTKLNDLCFTNVYADSFVIRGNEVSQIAPGQTGNIADYNYKLPDDFTGCVIAWNSNKLDSKPSGNYNYLYRLLRKSKLKPFERDISTEIYQAGNRPCNGVAGPNCYSPLQSYGFRPTYGVGHQPYRVVVLSFELLHASATVCGPKKSTNLVKNKCVNFNFNGLTGTGVLTESNKKFLPFQQFGRDIADTTDAVRDPQTLEILDITPCSFGGVSVITPGTNTSNQVAVLYQGVNCTEVPVAIHADQLTPTWRVYSTGSNVFQTRAGCLIGAEYVNNSYECDIPIGAGICASYQTQTKSHQQAQSVASQSIIAYTMSLGAENSVAYSNNSIAIPTNFTISVTTEILPVSMTKTSVDCTMYICGDSTECSNLLLQYGSFCTQLKRALTGIAVEQDKNTQEVFAQVKQIYKTPPIKYFGGFNFSQILPDPSKPSKRSFIEDLLFNKVTLADAGFIKQYGDCLGDIAARDLICAQKFNGLTVLPPLLTDEMIAQYTSALLAGTITSGWTFGAGAALQIPFAMQMAYRFNGIGVTQNVLYENQKLIANQFNSAIGKIQDSLSSTASALGKLQDVVNHNAQALNTLVKQLSSKFGAISSVLNDILSRLDPPEAEVQIDRLITGRLQSLQTYVTQQLIRAAEIRASANLAATKMSECVLGQSKRVDFCGKGYHLMSFPQSAPHGVVFLHVTYVPAQEKNFTTAPAICHDGKAHFPREGVFVSNGTHWFVTQRNFYEPQIITTDNTFVSGNCDVVIGIVNNTVYDPLQPELDSFKEELDKYFKNHTSPDVDLGDISGINASVVNIQKEIDRLNEVAKNLNESLIDLQELGKYEQYIKWPWYIWLGFIAGLIAIVMVTIMLCCMTSCCSCLKGCCSCGSCCKFDEDDSEPVLKGVKLHYT

SEQ ID NO: 316 - protein, 1256 aa, synthetic construct
QCVNLITRTQSYTNSFTRGVYYPDKVFRSSVLHSTQDLFLPFFSNVTWFHAIHVSGTNGTKRFDNPALPFNDGVYFASTEKSNIIRGWIFGTTLDSKTQSLLIVNNATNVVIKVCEFQFCNDPFLDVYQKNNKSWMESEFRVYSSANNCTFEYVSQPFLMDLVGKEGNFKNLREFVFKNIDGYFKIYSKHTPINLERDLPQGFSALEPLVDLPIGINITRFQTLLALHRSYLTPVDSSSGWTAGAAAYYVGYLQPRTFLLKYNENGTITDAVDCALDPLSETKCTLKSFTVEKGIYQTSNFRVQPTESIVRFPNITNLCPFHEVFNATTFASVYAWNRKRISNCVADYSVIYNFAPFFAFKCYGVSPTKLNDLCFTNVYADSFVIRGNEVSQIAPGQTGNIADYNYKLPDDFTGCVIAWNSNKLDSKPSGNYNYLYRLLRKSKLKPFERDISTEIYQAGNRPCNGVAGPNCYSPLQSYGFRPTYGVGHQPYRVVVLSFELLHASATVCGPKKSTNLVKNKCVNFNFNGLTGTGVLTESNKKFLPFQQFGRDIADTTDAVRDPQTLEILDITPCSFGGVSVITPGTNTSNQVAVLYQGVNCTEVPVAIHADQLTPTWRVYSTGSNVFQTRAGCLIGAEYVNNSYECDIPIGAGICASYQTQTKSHQQAQSVASQSIIAYTMSLGAENSVAYSNNSIAIPTNFTISVTTEILPVSMTKTSVDCTMYICGDSTECSNLLLQYGSFCTQLKRALTGIAVEQDKNTQEVFAQVKQIYKTPPIKYFGGFNFSQILPDPSKPSKRSFIEDLLFNKVTLADAGFIKQYGDCLGDIAARDLICAQKFNGLTVLPPLLTDEMIAQYTSALLAGTITSGWTFGAGAALQIPFAMQMAYRFNGIGVTQNVLYENQKLIANQFNSAIGKIQDSLSSTASALGKLQDVVNHNAQALNTLVKQLSSKFGAISSVLNDILSRLDPPEAEVQIDRLITGRLQSLQTYVTQQLIRAAEIRASANLAATKMSECVLGQSKRVDFCGKGYHLMSFPQSAPHGVVFLHVTYVPAQEKNFTTAPAICHDGKAHFPREGVFVSNGTHWFVTQRNFYEPQIITTDNTFVSGNCDVVIGIVNNTVYDPLQPELDSFKEELDKYFKNHTSPDVDLGDISGINASVVNIQKEIDRLNEVAKNLNESLIDLQELGKYEQYIKWPWYIWLGFIAGLIAIVMVTIMLCCMTSCCSCLKGCCSCGSCCKFDEDDSEPVLKGVKLHYT

SEQ ID NO: 317 - protein, 1269 aa, synthetic construct
MFVFLVLLPLVSSQCVNLITRTQSYTNSFTRGVYYPDKVFRSSVLHSTQDLFLPFFSNVTWFHAIHVSGTNGTKRFDNPALPFNDGVYFASTEKSNIIRGWIFGTTLDSKTQSLLIVNNATNVVIKVCEFQFCNDPFLDVYQKNNKSWMESEFRVYSSANNCTFEYVSQPFLMDLVGKEGNFKNLREFVFKNIDGYFKIYSKHTPINLERDLPQGFSALEPLVDLPIGINITRFQTLLALHRSYLTPVDSSSGWTAGAAAYYVGYLQPRTFLLKYNENGTITDAVDCALDPLSETKCTLKSFTVEKGIYQTSNFRVQPTESIVRFPNITNLCPFHEVFNATTFASVYAWNRKRISNCVADYSVIYNFAPFFAFKCYGVSPTKLNDLCFTNVYADSFVIRGNEVSQIAPGQTGNIADYNYKLPDDFTGCVIAWNSNKLDSTPSGNYNYLYRLLRKSKLKPFERDISTEIYQAGNRPCNGVAGPNCYSPLQSYGFRPTYGVGHQPYRVVVLSFELLHAPATVCGPKKSTNLVKNKCVNFNFNGLTGTGVLTESNKKFLPFQQFGRDIADTTDAVRDPQTLEILDITPCSFGGVSVITPGTNTSNQVAVLYQGVNCTEVPVAIHADQLTPTWRVYSTGSNVFQTRAGCLIGAEYVNNSYECDIPIGAGICASYQTQTKSHRRARSVASQSIIAYTMSLGAENSVAYSNNSIAIPTNFTISVTTEILPVSMTKTSVDCTMYICGDSTECSNLLLQYGSFCTQLKRALTGIAVEQDKNTQEVFAQVKQIYKTPPIKYFGGFNFSQILPDPSKPSKRSFIEDLLFNKVTLADAGFIKQYGDCLGDIAARDLICAQKFNGLTVLPPLLTDEMIAQYTSALLAGTITSGWTFGAGAALQIPFAMQMAYRFNGIGVTQNVLYENQKLIANQFNSAIGKIQDSLSSTASALGKLQDVVNHNAQALNTLVKQLSSKFGAISSVLNDILSRLDKVEAEVQIDRLITGRLQSLQTYVTQQLIRAAEIRASANLAATKMSECVLGQSKRVDFCGKGYHLMSFPQSAPHGVVFLHVTYVPAQEKNFTTAPAICHDGKAHFPREGVFVSNGTHWFVTQRNFYEPQIITTDNTFVSGNCDVVIGIVNNTVYDPLQPELDSFKEELDKYFKNHTSPDVDLGDISGINASVVNIQKEIDRLNEVAKNLNESLIDLQELGKYEQYIKWPWYIWLGFIAGLIAIVMVTIMLCCMTSCCSCLKGCCSCGSCCKFDEDDSEPVLKGVKLHYT

SEQ ID NO: 318 - protein, 1256 aa, synthetic construct
QCVNLITRTQSYTNSFTRGVYYPDKVFRSSVLHSTQDLFLPFFSNVTWFHAIHVSGTNGTKRFDNPALPFNDGVYFASTEKSNIIRGWIFGTTLDSKTQSLLIVNNATNVVIKVCEFQFCNDPFLDVYQKNNKSWMESEFRVYSSANNCTFEYVSQPFLMDLVGKEGNFKNLREFVFKNIDGYFKIYSKHTPINLERDLPQGFSALEPLVDLPIGINITRFQTLLALHRSYLTPVDSSSGWTAGAAAYYVGYLQPRTFLLKYNENGTITDAVDCALDPLSETKCTLKSFTVEKGIYQTSNFRVQPTESIVRFPNITNLCPFHEVFNATTFASVYAWNRKRISNCVADYSVIYNFAPFFAFKCYGVSPTKLNDLCFTNVYADSFVIRGNEVSQIAPGQTGNIADYNYKLPDDFTGCVIAWNSNKLDSTPSGNYNYLYRLLRKSKLKPFERDISTEIYQAGNRPCNGVAGPNCYSPLQSYGFRPTYGVGHQPYRVVVLSFELLHAPATVCGPKKSTNLVKNKCVNFNFNGLTGTGVLTESNKKFLPFQQFGRDIADTTDAVRDPQTLEILDITPCSFGGVSVITPGTNTSNQVAVLYQGVNCTEVPVAIHADQLTPTWRVYSTGSNVFQTRAGCLIGAEYVNNSYECDIPIGAGICASYQTQTKSHRRARSVASQSIIAYTMSLGAENSVAYSNNSIAIPTNFTISVTTEILPVSMTKTSVDCTMYICGDSTECSNLLLQYGSFCTQLKRALTGIAVEQDKNTQEVFAQVKQIYKTPPIKYFGGFNFSQILPDPSKPSKRSFIEDLLFNKVTLADAGFIKQYGDCLGDIAARDLICAQKFNGLTVLPPLLTDEMIAQYTSALLAGTITSGWTFGAGAALQIPFAMQMAYRFNGIGVTQNVLYENQKLIANQFNSAIGKIQDSLSSTASALGKLQDVVNHNAQALNTLVKQLSSKFGAISSVLNDILSRLDKVEAEVQIDRLITGRLQSLQTYVTQQLIRAAEIRASANLAATKMSECVLGQSKRVDFCGKGYHLMSFPQSAPHGVVFLHVTYVPAQEKNFTTAPAICHDGKAHFPREGVFVSNGTHWFVTQRNFYEPQIITTDNTFVSGNCDVVIGIVNNTVYDPLQPELDSFKEELDKYFKNHTSPDVDLGDISGINASVVNIQKEIDRLNEVAKNLNESLIDLQELGKYEQYIKWPWYIWLGFIAGLIAIVMVTIMLCCMTSCCSCLKGCCSCGSCCKFDEDDSEPVLKGVKLHYT

SEQ ID NO: 319 - protein, 1269 aa, synthetic construct
MFVFLVLLPLVSSQCVNLITRTQSYTNSFTRGVYYPDKVFRSSVLHSTQDLFLPFFSNVTWFHAIHVSGTNGTKRFDNPALPFNDGVYFASTEKSNIIRGWIFGTTLDSKTQSLLIVNNATNVVIKVCEFQFCNDPFLDVYQKNNKSWMESEFRVYSSANNCTFEYVSQPFLMDLVGKEGNFKNLREFVFKNIDGYFKIYSKHTPINLERDLPQGFSALEPLVDLPIGINITRFQTLLALHRSYLTPVDSSSGWTAGAAAYYVGYLQPRTFLLKYNENGTITDAVDCALDPLSETKCTLKSFTVEKGIYQTSNFRVQPTESIVRFPNITNLCPFHEVFNATTFASVYAWNRKRISNCVADYSVIYNFAPFFAFKCYGVSPTKLNDLCFTNVYADSFVIRGNEVSQIAPGQTGNIADYNYKLPDDFTGCVIAWNSNKLDSTPSGNYNYLYRLLRKSKLKPFERDISTEIYQAGNRPCNGVAGPNCYSPLQSYGFRPTYGVGHQPYRVVVLSFELLHAPATVCGPKKSTNLVKNKCVNFNFNGLTGTGVLTESNKKFLPFQQFGRDIADTTDAVRDPQTLEILDITPCSFGGVSVITPGTNTSNQVAVLYQGVNCTEVPVAIHADQLTPTWRVYSTGSNVFQTRAGCLIGAEYVNNSYECDIPIGAGICASYQTQTKSHQQAQSVASQSIIAYTMSLGAENSVAYSNNSIAIPTNFTISVTTEILPVSMTKTSVDCTMYICGDSTECSNLLLQYGSFCTQLKRALTGIAVEQDKNTQEVFAQVKQIYKTPPIKYFGGFNFSQILPDPSKPSKRSFIEDLLFNKVTLADAGFIKQYGDCLGDIAARDLICAQKFNGLTVLPPLLTDEMIAQYTSALLAGTITSGWTFGAGAALQIPFAMQMAYRFNGIGVTQNVLYENQKLIANQFNSAIGKIQDSLSSTASALGKLQDVVNHNAQALNTLVKQLSSKFGAISSVLNDILSRLDPPEAEVQIDRLITGRLQSLQTYVTQQLIRAAEIRASANLAATKMSECVLGQSKRVDFCGKGYHLMSFPQSAPHGVVFLHVTYVPAQEKNFTTAPAICHDGKAHFPREGVFVSNGTHWFVTQRNFYEPQIITTDNTFVSGNCDVVIGIVNNTVYDPLQPELDSFKEELDKYFKNHTSPDVDLGDISGINASVVNIQKEIDRLNEVAKNLNESLIDLQELGKYEQYIKWPWYIWLGFIAGLIAIVMVTIMLCCMTSCCSCLKGCCSCGSCCKFDEDDSEPVLKGVKLHYT

SEQ ID NO: 320 - protein, 1256 aa, synthetic construct
QCVNLITRTQSYTNSFTRGVYYPDKVFRSSVLHSTQDLFLPFFSNVTWFHAIHVSGTNGTKRFDNPALPFNDGVYFASTEKSNIIRGWIFGTTLDSKTQSLLIVNNATNVVIKVCEFQFCNDPFLDVYQKNNKSWMESEFRVYSSANNCTFEYVSQPFLMDLVGKEGNFKNLREFVFKNIDGYFKIYSKHTPINLERDLPQGFSALEPLVDLPIGINITRFQTLLALHRSYLTPVDSSSGWTAGAAAYYVGYLQPRTFLLKYNENGTITDAVDCALDPLSETKCTLKSFTVEKGIYQTSNFRVQPTESIVRFPNITNLCPFHEVFNATTFASVYAWNRKRISNCVADYSVIYNFAPFFAFKCYGVSPTKLNDLCFTNVYADSFVIRGNEVSQIAPGQTGNIADYNYKLPDDFTGCVIAWNSNKLDSTPSGNYNYLYRLLRKSKLKPFERDISTEIYQAGNRPCNGVAGPNCYSPLQSYGFRPTYGVGHQPYRVVVLSFELLHAPATVCGPKKSTNLVKNKCVNFNFNGLTGTGVLTESNKKFLPFQQFGRDIADTTDAVRDPQTLEILDITPCSFGGVSVITPGTNTSNQVAVLYQGVNCTEVPVAIHADQLTPTWRVYSTGSNVFQTRAGCLIGAEYVNNSYECDIPIGAGICASYQTQTKSHQQAQSVASQSIIAYTMSLGAENSVAYSNNSIAIPTNFTISVTTEILPVSMTKTSVDCTMYICGDSTECSNLLLQYGSFCTQLKRALTGIAVEQDKNTQEVFAQVKQIYKTPPIKYFGGFNFSQILPDPSKPSKRSFIEDLLFNKVTLADAGFIKQYGDCLGDIAARDLICAQKFNGLTVLPPLLTDEMIAQYTSALLAGTITSGWTFGAGAALQIPFAMQMAYRFNGIGVTQNVLYENQKLIANQFNSAIGKIQDSLSSTASALGKLQDVVNHNAQALNTLVKQLSSKFGAISSVLNDILSRLDPPEAEVQIDRLITGRLQSLQTYVTQQLIRAAEIRASANLAATKMSECVLGQSKRVDFCGKGYHLMSFPQSAPHGVVFLHVTYVPAQEKNFTTAPAICHDGKAHFPREGVFVSNGTHWFVTQRNFYEPQIITTDNTFVSGNCDVVIGIVNNTVYDPLQPELDSFKEELDKYFKNHTSPDVDLGDISGINASVVNIQKEIDRLNEVAKNLNESLIDLQELGKYEQYIKWPWYIWLGFIAGLIAIVMVTIMLCCMTSCCSCLKGCCSCGSCCKFDEDDSEPVLKGVKLHYT

SEQ ID NO: 321 - protein, 1269 aa, synthetic construct
MFVFLVLLPLVSSQCVNLITRTQSYTNSFTRGVYYPDKVFRSSVLHSTQDLFLPFFSNVTWFHAIHVSGTNGTKRFDNPALPFNDGVYFASTEKSNIIRGWIFGTTLDSKTQSLLIVNNATNVVIKVCEFQFCNDPFLDVYQKNNKSWMESEFRVYSSANNCTFEYVSQPFLMDLVGKEGNFKNLREFVFKNIDGYFKIYSKHTPINLERDLPQGFSALEPLVDLPIGINITRFQTLLALHRSYLTPVDSSSGWTAGAAAYYVGYLQPRTFLLKYNENGTITDAVDCALDPLSETKCTLKSFTVEKGIYQTSNFRVQPTESIVRFPNITNLCPFHEVFNATTFASVYAWNRKRISNCVADYSVIYNFAPFFAFKCYGVSPTKLNDLCFTNVYADSFVIRGNEVSQIAPGQTGNIADYNYKLPDDFTGCVIAWNSNKLDSKPSGNYNYLYRLLRKSKLKPFERDISTEIYQAGNRPCNGVAGSNCYSPLQSYGFRPTYGVGHQPYRVVVLSFELLHAPATVCGPKKSTNLVKNKCVNFNFNGLTGTGVLTESNKKFLPFQQFGRDIADTTDAVRDPQTLEILDITPCSFGGVSVITPGTNTSNQVAVLYQGVNCTEVPVAIHADQLTPTWRVYSTGSNVFQTRAGCLIGAEYVNNSYECDIPIGAGICASYQTQTKSHRRARSVASQSIIAYTMSLGAENSVAYSNNSIAIPTNFTISVTTEILPVSMTKTSVDCTMYICGDSTECSNLLLQYGSFCTQLKRALTGIAVEQDKNTQEVFAQVKQIYKTPPIKYFGGFNFSQILPDPSKPSKRSFIEDLLFNKVTLADAGFIKQYGDCLGDIAARDLICAQKFNGLTVLPPLLTDEMIAQYTSALLAGTITSGWTFGAGAALQIPFAMQMAYRFNGIGVTQNVLYENQKLIANQFNSAIGKIQDSLSSTASALGKLQDVVNHNAQALNTLVKQLSSKFGAISSVLNDILSRLDKVEAEVQIDRLITGRLQSLQTYVTQQLIRAAEIRASANLAATKMSECVLGQSKRVDFCGKGYHLMSFPQSAPHGVVFLHVTYVPAQEKNFTTAPAICHDGKAHFPREGVFVSNGTHWFVTQRNFYEPQIITTDNTFVSGNCDVVIGIVNNTVYDPLQPELDSFKEELDKYFKNHTSPDVDLGDISGINASVVNIQKEIDRLNEVAKNLNESLIDLQELGKYEQYIKWPWYIWLGFIAGLIAIVMVTIMLCCMTSCCSCLKGCCSCGSCCKFDEDDSEPVLKGVKLHYT

SEQ ID NO: 322 - protein, 1256 aa, synthetic construct
QCVNLITRTQSYTNSFTRGVYYPDKVFRSSVLHSTQDLFLPFFSNVTWFHAIHVSGTNGTKRFDNPALPFNDGVYFASTEKSNIIRGWIFGTTLDSKTQSLLIVNNATNVVIKVCEFQFCNDPFLDVYQKNNKSWMESEFRVYSSANNCTFEYVSQPFLMDLVGKEGNFKNLREFVFKNIDGYFKIYSKHTPINLERDLPQGFSALEPLVDLPIGINITRFQTLLALHRSYLTPVDSSSGWTAGAAAYYVGYLQPRTFLLKYNENGTITDAVDCALDPLSETKCTLKSFTVEKGIYQTSNFRVQPTESIVRFPNITNLCPFHEVFNATTFASVYAWNRKRISNCVADYSVIYNFAPFFAFKCYGVSPTKLNDLCFTNVYADSFVIRGNEVSQIAPGQTGNIADYNYKLPDDFTGCVIAWNSNKLDSKPSGNYNYLYRLLRKSKLKPFERDISTEIYQAGNRPCNGVAGSNCYSPLQSYGFRPTYGVGHQPYRVVVLSFELLHAPATVCGPKKSTNLVKNKCVNFNFNGLTGTGVLTESNKKFLPFQQFGRDIADTTDAVRDPQTLEILDITPCSFGGVSVITPGTNTSNQVAVLYQGVNCTEVPVAIHADQLTPTWRVYSTGSNVFQTRAGCLIGAEYVNNSYECDIPIGAGICASYQTQTKSHRRARSVASQSIIAYTMSLGAENSVAYSNNSIAIPTNFTISVTTEILPVSMTKTSVDCTMYICGDSTECSNLLLQYGSFCTQLKRALTGIAVEQDKNTQEVFAQVKQIYKTPPIKYFGGFNFSQILPDPSKPSKRSFIEDLLFNKVTLADAGFIKQYGDCLGDIAARDLICAQKFNGLTVLPPLLTDEMIAQYTSALLAGTITSGWTFGAGAALQIPFAMQMAYRFNGIGVTQNVLYENQKLIANQFNSAIGKIQDSLSSTASALGKLQDVVNHNAQALNTLVKQLSSKFGAISSVLNDILSRLDKVEAEVQIDRLITGRLQSLQTYVTQQLIRAAEIRASANLAATKMSECVLGQSKRVDFCGKGYHLMSFPQSAPHGVVFLHVTYVPAQEKNFTTAPAICHDGKAHFPREGVFVSNGTHWFVTQRNFYEPQIITTDNTFVSGNCDVVIGIVNNTVYDPLQPELDSFKEELDKYFKNHTSPDVDLGDISGINASVVNIQKEIDRLNEVAKNLNESLIDLQELGKYEQYIKWPWYIWLGFIAGLIAIVMVTIMLCCMTSCCSCLKGCCSCGSCCKFDEDDSEPVLKGVKLHYT

SEQ ID NO: 323 - protein, 1269 aa, synthetic construct
MFVFLVLLPLVSSQCVNLITRTQSYTNSFTRGVYYPDKVFRSSVLHSTQDLFLPFFSNVTWFHAIHVSGTNGTKRFDNPALPFNDGVYFASTEKSNIIRGWIFGTTLDSKTQSLLIVNNATNVVIKVCEFQFCNDPFLDVYQKNNKSWMESEFRVYSSANNCTFEYVSQPFLMDLVGKEGNFKNLREFVFKNIDGYFKIYSKHTPINLERDLPQGFSALEPLVDLPIGINITRFQTLLALHRSYLTPVDSSSGWTAGAAAYYVGYLQPRTFLLKYNENGTITDAVDCALDPLSETKCTLKSFTVEKGIYQTSNFRVQPTESIVRFPNITNLCPFHEVFNATTFASVYAWNRKRISNCVADYSVIYNFAPFFAFKCYGVSPTKLNDLCFTNVYADSFVIRGNEVSQIAPGQTGNIADYNYKLPDDFTGCVIAWNSNKLDSKPSGNYNYLYRLLRKSKLKPFERDISTEIYQAGNRPCNGVAGSNCYSPLQSYGFRPTYGVGHQPYRVVVLSFELLHAPATVCGPKKSTNLVKNKCVNFNFNGLTGTGVLTESNKKFLPFQQFGRDIADTTDAVRDPQTLEILDITPCSFGGVSVITPGTNTSNQVAVLYQGVNCTEVPVAIHADQLTPTWRVYSTGSNVFQTRAGCLIGAEYVNNSYECDIPIGAGICASYQTQTKSHQQAQSVASQSIIAYTMSLGAENSVAYSNNSIAIPTNFTISVTTEILPVSMTKTSVDCTMYICGDSTECSNLLLQYGSFCTQLKRALTGIAVEQDKNTQEVFAQVKQIYKTPPIKYFGGFNFSQILPDPSKPSKRSFIEDLLFNKVTLADAGFIKQYGDCLGDIAARDLICAQKFNGLTVLPPLLTDEMIAQYTSALLAGTITSGWTFGAGAALQIPFAMQMAYRFNGIGVTQNVLYENQKLIANQFNSAIGKIQDSLSSTASALGKLQDVVNHNAQALNTLVKQLSSKFGAISSVLNDILSRLDPPEAEVQIDRLITGRLQSLQTYVTQQLIRAAEIRASANLAATKMSECVLGQSKRVDFCGKGYHLMSFPQSAPHGVVFLHVTYVPAQEKNFTTAPAICHDGKAHFPREGVFVSNGTHWFVTQRNFYEPQIITTDNTFVSGNCDVVIGIVNNTVYDPLQPELDSFKEELDKYFKNHTSPDVDLGDISGINASVVNIQKEIDRLNEVAKNLNESLIDLQELGKYEQYIKWPWYIWLGFIAGLIAIVMVTIMLCCMTSCCSCLKGCCSCGSCCKFDEDDSEPVLKGVKLHYT

SEQ ID NO: 324 - protein, 1256 aa, synthetic construct
QCVNLITRTQSYTNSFTRGVYYPDKVFRSSVLHSTQDLFLPFFSNVTWFHAIHVSGTNGTKRFDNPALPFNDGVYFASTEKSNIIRGWIFGTTLDSKTQSLLIVNNATNVVIKVCEFQFCNDPFLDVYQKNNKSWMESEFRVYSSANNCTFEYVSQPFLMDLVGKEGNFKNLREFVFKNIDGYFKIYSKHTPINLERDLPQGFSALEPLVDLPIGINITRFQTLLALHRSYLTPVDSSSGWTAGAAAYYVGYLQPRTFLLKYNENGTITDAVDCALDPLSETKCTLKSFTVEKGIYQTSNFRVQPTESIVRFPNITNLCPFHEVFNATTFASVYAWNRKRISNCVADYSVIYNFAPFFAFKCYGVSPTKLNDLCFTNVYADSFVIRGNEVSQIAPGQTGNIADYNYKLPDDFTGCVIAWNSNKLDSKPSGNYNYLYRLLRKSKLKPFERDISTEIYQAGNRPCNGVAGSNCYSPLQSYGFRPTYGVGHQPYRVVVLSFELLHAPATVCGPKKSTNLVKNKCVNFNFNGLTGTGVLTESNKKFLPFQQFGRDIADTTDAVRDPQTLEILDITPCSFGGVSVITPGTNTSNQVAVLYQGVNCTEVPVAIHADQLTPTWRVYSTGSNVFQTRAGCLIGAEYVNNSYECDIPIGAGICASYQTQTKSHQQAQSVASQSIIAYTMSLGAENSVAYSNNSIAIPTNFTISVTTEILPVSMTKTSVDCTMYICGDSTECSNLLLQYGSFCTQLKRALTGIAVEQDKNTQEVFAQVKQIYKTPPIKYFGGFNFSQILPDPSKPSKRSFIEDLLFNKVTLADAGFIKQYGDCLGDIAARDLICAQKFNGLTVLPPLLTDEMIAQYTSALLAGTITSGWTFGAGAALQIPFAMQMAYRFNGIGVTQNVLYENQKLIANQFNSAIGKIQDSLSSTASALGKLQDVVNHNAQALNTLVKQLSSKFGAISSVLNDILSRLDPPEAEVQIDRLITGRLQSLQTYVTQQLIRAAEIRASANLAATKMSECVLGQSKRVDFCGKGYHLMSFPQSAPHGVVFLHVTYVPAQEKNFTTAPAICHDGKAHFPREGVFVSNGTHWFVTQRNFYEPQIITTDNTFVSGNCDVVIGIVNNTVYDPLQPELDSFKEELDKYFKNHTSPDVDLGDISGINASVVNIQKEIDRLNEVAKNLNESLIDLQELGKYEQYIKWPWYIWLGFIAGLIAIVMVTIMLCCMTSCCSCLKGCCSCGSCCKFDEDDSEPVLKGVKLHYT

SEQ ID NO: 325 - protein, 1269 aa, synthetic construct
MFVFLVLLPLVSSQCVNLITRTQSYTNSFTRGVYYPDKVFRSSVLHSTQDLFLPFFSNVTWFHAIHVSGTNGTKRFDNPALPFNDGVYFASTEKSNIIRGWIFGTTLDSKTQSLLIVNNATNVVIKVCEFQFCNDPFLDVYQKNNKSWMESEFRVYSSANNCTFEYVSQPFLMDLVGKEGNFKNLREFVFKNIDGYFKIYSKHTPINLERDLPQGFSALEPLVDLPIGINITRFQTLLALHRSYLTPVDSSSGWTAGAAAYYVGYLQPRTFLLKYNENGTITDAVDCALDPLSETKCTLKSFTVEKGIYQTSNFRVQPTESIVRFPNITNLCPFHEVFNATTFASVYAWNRKRISNCVADYSVIYNFAPFFAFKCYGVSPTKLNDLCFTNVYADSFVIRGNEVSQIAPGQTGNIADYNYKLPDDFTGCVIAWNSNKLDSKPSGNYNYLYRLLRKSKLKPFERDISTEIYQAGNKPCNGVAGPNCYSPLQSYGFRPTYGVGHQPYRVVVLSFELLHAPATVCGPKKSTNLVKNKCVNFNFNGLTGTGVLTESNKKFLPFQQFGRDIADTTDAVRDPQTLEILDITPCSFGGVSVITPGTNTSNQVAVLYQGVNCTEVPVAIHADQLTPTWRVYSTGSNVFQTRAGCLIGAEYVNNSYECDIPIGAGICASYQTQTKSHRRARSVASQSIIAYTMSLGAENSVAYSNNSIAIPTNFTISVTTEILPVSMTKTSVDCTMYICGDSTECSNLLLQYGSFCTQLKRALTGIAVEQDKNTQEVFAQVKQIYKTPPIKYFGGFNFSQILPDPSKPSKRSFIEDLLFNKVTLADAGFIKQYGDCLGDIAARDLICAQKFNGLTVLPPLLTDEMIAQYTSALLAGTITSGWTFGAGAALQIPFAMQMAYRFNGIGVTQNVLYENQKLIANQFNSAIGKIQDSLSSTASALGKLQDVVNHNAQALNTLVKQLSSKFGAISSVLNDILSRLDKVEAEVQIDRLITGRLQSLQTYVTQQLIRAAEIRASANLAATKMSECVLGQSKRVDFCGKGYHLMSFPQSAPHGVVFLHVTYVPAQEKNFTTAPAICHDGKAHFPREGVFVSNGTHWFVTQRNFYEPQIITTDNTFVSGNCDVVIGIVNNTVYDPLQPELDSFKEELDKYFKNHTSPDVDLGDISGINASVVNIQKEIDRLNEVAKNLNESLIDLQELGKYEQYIKWPWYIWLGFIAGLIAIVMVTIMLCCMTSCCSCLKGCCSCGSCCKFDEDDSEPVLKGVKLHYT

SEQ ID NO: 326 - protein, 1256 aa, synthetic construct
QCVNLITRTQSYTNSFTRGVYYPDKVFRSSVLHSTQDLFLPFFSNVTWFHAIHVSGTNGTKRFDNPALPFNDGVYFASTEKSNIIRGWIFGTTLDSKTQSLLIVNNATNVVIKVCEFQFCNDPFLDVYQKNNKSWMESEFRVYSSANNCTFEYVSQPFLMDLVGKEGNFKNLREFVFKNIDGYFKIYSKHTPINLERDLPQGFSALEPLVDLPIGINITRFQTLLALHRSYLTPVDSSSGWTAGAAAYYVGYLQPRTFLLKYNENGTITDAVDCALDPLSETKCTLKSFTVEKGIYQTSNFRVQPTESIVRFPNITNLCPFHEVFNATTFASVYAWNRKRISNCVADYSVIYNFAPFFAFKCYGVSPTKLNDLCFTNVYADSFVIRGNEVSQIAPGQTGNIADYNYKLPDDFTGCVIAWNSNKLDSKPSGNYNYLYRLLRKSKLKPFERDISTEIYQAGNKPCNGVAGPNCYSPLQSYGFRPTYGVGHQPYRVVVLSFELLHAPATVCGPKKSTNLVKNKCVNFNFNGLTGTGVLTESNKKFLPFQQFGRDIADTTDAVRDPQTLEILDITPCSFGGVSVITPGTNTSNQVAVLYQGVNCTEVPVAIHADQLTPTWRVYSTGSNVFQTRAGCLIGAEYVNNSYECDIPIGAGICASYQTQTKSHRRARSVASQSIIAYTMSLGAENSVAYSNNSIAIPTNFTISVTTEILPVSMTKTSVDCTMYICGDSTECSNLLLQYGSFCTQLKRALTGIAVEQDKNTQEVFAQVKQIYKTPPIKYFGGFNFSQILPDPSKPSKRSFIEDLLFNKVTLADAGFIKQYGDCLGDIAARDLICAQKFNGLTVLPPLLTDEMIAQYTSALLAGTITSGWTFGAGAALQIPFAMQMAYRFNGIGVTQNVLYENQKLIANQFNSAIGKIQDSLSSTASALGKLQDVVNHNAQALNTLVKQLSSKFGAISSVLNDILSRLDKVEAEVQIDRLITGRLQSLQTYVTQQLIRAAEIRASANLAATKMSECVLGQSKRVDFCGKGYHLMSFPQSAPHGVVFLHVTYVPAQEKNFTTAPAICHDGKAHFPREGVFVSNGTHWFVTQRNFYEPQIITTDNTFVSGNCDVVIGIVNNTVYDPLQPELDSFKEELDKYFKNHTSPDVDLGDISGINASVVNIQKEIDRLNEVAKNLNESLIDLQELGKYEQYIKWPWYIWLGFIAGLIAIVMVTIMLCCMTSCCSCLKGCCSCGSCCKFDEDDSEPVLKGVKLHYT

SEQ ID NO: 327 - protein, 1269 aa, synthetic construct
MFVFLVLLPLVSSQCVNLITRTQSYTNSFTRGVYYPDKVFRSSVLHSTQDLFLPFFSNVTWFHAIHVSGTNGTKRFDNPALPFNDGVYFASTEKSNIIRGWIFGTTLDSKTQSLLIVNNATNVVIKVCEFQFCNDPFLDVYQKNNKSWMESEFRVYSSANNCTFEYVSQPFLMDLVGKEGNFKNLREFVFKNIDGYFKIYSKHTPINLERDLPQGFSALEPLVDLPIGINITRFQTLLALHRSYLTPVDSSSGWTAGAAAYYVGYLQPRTFLLKYNENGTITDAVDCALDPLSETKCTLKSFTVEKGIYQTSNFRVQPTESIVRFPNITNLCPFHEVFNATTFASVYAWNRKRISNCVADYSVIYNFAPFFAFKCYGVSPTKLNDLCFTNVYADSFVIRGNEVSQIAPGQTGNIADYNYKLPDDFTGCVIAWNSNKLDSKPSGNYNYLYRLLRKSKLKPFERDISTEIYQAGNKPCNGVAGPNCYSPLQSYGFRPTYGVGHQPYRVVVLSFELLHAPATVCGPKKSTNLVKNKCVNFNFNGLTGTGVLTESNKKFLPFQQFGRDIADTTDAVRDPQTLEILDITPCSFGGVSVITPGTNTSNQVAVLYQGVNCTEVPVAIHADQLTPTWRVYSTGSNVFQTRAGCLIGAEYVNNSYECDIPIGAGICASYQTQTKSHQQAQSVASQSIIAYTMSLGAENSVAYSNNSIAIPTNFTISVTTEILPVSMTKTSVDCTMYICGDSTECSNLLLQYGSFCTQLKRALTGIAVEQDKNTQEVFAQVKQIYKTPPIKYFGGFNFSQILPDPSKPSKRSFIEDLLFNKVTLADAGFIKQYGDCLGDIAARDLICAQKFNGLTVLPPLLTDEMIAQYTSALLAGTITSGWTFGAGAALQIPFAMQMAYRFNGIGVTQNVLYENQKLIANQFNSAIGKIQDSLSSTASALGKLQDVVNHNAQALNTLVKQLSSKFGAISSVLNDILSRLDPPEAEVQIDRLITGRLQSLQTYVTQQLIRAAEIRASANLAATKMSECVLGQSKRVDFCGKGYHLMSFPQSAPHGVVFLHVTYVPAQEKNFTTAPAICHDGKAHFPREGVFVSNGTHWFVTQRNFYEPQIITTDNTFVSGNCDVVIGIVNNTVYDPLQPELDSFKEELDKYFKNHTSPDVDLGDISGINASVVNIQKEIDRLNEVAKNLNESLIDLQELGKYEQYIKWPWYIWLGFIAGLIAIVMVTIMLCCMTSCCSCLKGCCSCGSCCKFDEDDSEPVLKGVKLHYT

SEQ ID NO: 328 - protein, 1256 aa, synthetic construct
QCVNLITRTQSYTNSFTRGVYYPDKVFRSSVLHSTQDLFLPFFSNVTWFHAIHVSGTNGTKRFDNPALPFNDGVYFASTEKSNIIRGWIFGTTLDSKTQSLLIVNNATNVVIKVCEFQFCNDPFLDVYQKNNKSWMESEFRVYSSANNCTFEYVSQPFLMDLVGKEGNFKNLREFVFKNIDGYFKIYSKHTPINLERDLPQGFSALEPLVDLPIGINITRFQTLLALHRSYLTPVDSSSGWTAGAAAYYVGYLQPRTFLLKYNENGTITDAVDCALDPLSETKCTLKSFTVEKGIYQTSNFRVQPTESIVRFPNITNLCPFHEVFNATTFASVYAWNRKRISNCVADYSVIYNFAPFFAFKCYGVSPTKLNDLCFTNVYADSFVIRGNEVSQIAPGQTGNIADYNYKLPDDFTGCVIAWNSNKLDSKPSGNYNYLYRLLRKSKLKPFERDISTEIYQAGNKPCNGVAGPNCYSPLQSYGFRPTYGVGHQPYRVVVLSFELLHAPATVCGPKKSTNLVKNKCVNFNFNGLTGTGVLTESNKKFLPFQQFGRDIADTTDAVRDPQTLEILDITPCSFGGVSVITPGTNTSNQVAVLYQGVNCTEVPVAIHADQLTPTWRVYSTGSNVFQTRAGCLIGAEYVNNSYECDIPIGAGICASYQTQTKSHQQAQSVASQSIIAYTMSLGAENSVAYSNNSIAIPTNFTISVTTEILPVSMTKTSVDCTMYICGDSTECSNLLLQYGSFCTQLKRALTGIAVEQDKNTQEVFAQVKQIYKTPPIKYFGGFNFSQILPDPSKPSKRSFIEDLLFNKVTLADAGFIKQYGDCLGDIAARDLICAQKFNGLTVLPPLLTDEMIAQYTSALLAGTITSGWTFGAGAALQIPFAMQMAYRFNGIGVTQNVLYENQKLIANQFNSAIGKIQDSLSSTASALGKLQDVVNHNAQALNTLVKQLSSKFGAISSVLNDILSRLDPPEAEVQIDRLITGRLQSLQTYVTQQLIRAAEIRASANLAATKMSECVLGQSKRVDFCGKGYHLMSFPQSAPHGVVFLHVTYVPAQEKNFTTAPAICHDGKAHFPREGVFVSNGTHWFVTQRNFYEPQIITTDNTFVSGNCDVVIGIVNNTVYDPLQPELDSFKEELDKYFKNHTSPDVDLGDISGINASVVNIQKEIDRLNEVAKNLNESLIDLQELGKYEQYIKWPWYIWLGFIAGLIAIVMVTIMLCCMTSCCSCLKGCCSCGSCCKFDEDDSEPVLKGVKLHYT

SEQ ID NO: 329 - protein, 1269 aa, synthetic construct
MFVFLVLLPLVSSQCVMPLFNLITTTQSYTNSFTRGVYYPDKVFRSSVLHLTQDLFLPFFSNVTWFHAISGTNGTKRFDNPVLPFNDGVYFASTEKSNIIRGWIFGTTLDSKTQSLLIVNNATNVFIKVCEFQFCNDPFLDVYHKNNKSWMESESGVYSSANNCTFEYVSQPFLMDLEGKQGNFKNLREFVFKNIDGYFKIYSKHTPIIGRDFPQGFSALEPLVDLPIGINITRFQTLLALNRSYLTPGDSSSGWTAGAADYYVGYLQPRTFLLKYNENGTITDAVDCALDPLSETKCTLKSFTVEKGIYQTSNFRVQPTESIVRFPNVTNLCPFHEVFNATRFASVYAWNRTRISNCVADYSVLYNFAPFFAFKCYGVSPTKLNDLCFTNVYADSFVIKGNEVSQIAPGQTGNIADYNYKLPDDFTGCVIAWNSNKLDSKHSGNYDYWYRSFRKSKLKPFERDISTEIYQAGNKPCKGKGPNCYFPLQSYGFRPTYGVGHQPYRVVVLSFELLHAPATVCGPKKSTNLVKNKCVNFNFNGLTGTGVLTKSNKKFLPFQQFGRDIVDTTDAVRDPQTLEILDITPCSFGGVSVITPGTNTSNQVAVLYQGVNCTEVSVAIHADQLTPTWRVYSTGSNVFQTRAGCLIGAEYVNNSYECDIPIGAGVCASYQTQTKSRQQAQSVASQSIIAYTMSLGAENSVAYSNNSIAIPTNFTISVTTEILPVSMTKTSVDCTMYICGDSTECSNLLLQYGSFCTQLKRALTGIAVEQDKNTQEVFAQVKQIYKTPPIKYFGGFNFSQILPDPSKPSKRSFIEDLLFNKVTLADAGFIKQYGDCLGDIAARDLICAQKFNGLTVLPPLLTDEMIAQYTSALLAGTITSGWTFGAGAALQIPFAMQMAYRFNGIGVTQNVLYENQKLIANQFNSAIGKIQDSLFSTASALGKLQDVVNHNAQALNTLVKQLSSKFGAISSVLNDILSRLDPPEAEVQIDRLITGRLQSLQTYVTQQLIRAAEIRASANLAATKMSECVLGQSKRVDFCGKGYHLMSFPQSAPHGVVFLHVTYVPAQEKNFTTAPAICHDGKAHFPREGVFVSNGTHWFVTQRNFYEPQIITTDNTFVSGNCDVVIGIVNNTVYDPLQLELDSFKEELDKYFKNHTSPDVDLGDISGINASVVNIQKEIDRLNEVAKNLNESLIDLQELGKYEQYIKWPWYIWLGFIAGLIAIVMVTIMLCCMTSCCSCLKGCCSCGSCCKFDEDDSEPVLKGVKLHYT

SEQ ID NO: 330 - protein, 1269 aa, synthetic construct
MFVFLVLLPLVSSQCVMPLFNLITTTQSYTNSFTRGVYYPDKVFRSSVLHLTQDLFLPFSSNVTWFHAISGTNGTKRFDNPVLPFNDGVYFASTEKSNIIRGWIFGTTLDSKTQSLLIVNNATNVFIKVCEFQFCNDPFLDVYHKNNKSWMESESGVYSSANNCTFEYVSQPFLMDLEGKQGNFKNLREFVFKNIDGYFKIYSKHTPIIGRDFPQGFSALEPLVDLPIGINITRFQTLLALNRSYLTPGDSSSGWTAGAADYYVGYLQPRTFLLKYNENGTITDAVDCALDPLSETKCTLKSFTVEKGIYQTSNFRVQPTESIVRFPNVTNLCPFHEVFNATTFASVYAWNRTRISNCVADYSVLYNFAPFFAFKCYGVSPTKLNDLCFTNVYADSFVIKGNEVSQIAPGQTGNIADYNYKLPDDFTGCVIAWNSNKLDSKHSGNYDYWYRSFRKSKLKPFERDISTEIYQAGNKPCKGKGPNCYFPLQSYGFRPTYGVGHQPYRVVVLSFELLHAPATVCGPKKSTNLVKNKCVNFNFNGLTGTGVLTKSNKKFLPFQQFGRDIVDTTDAVRDPQTLEILDITPCSFGGVSVITPGTNTSNQVAVLYQGVNCTEVSVAIHADQLTPTWRVYSTGSNVFQTRAGCLIGAEYVNNSYECDIPIGAGICASYQTQTKSRQQAQSVASQSIIAYTMSLGAENSVAYSNNSIAIPTNFTISVTTEILPVSMTKTSVDCTMYICGDSTECSNLLLQYGSFCTQLKRALTGIAVEQDKNTQEVFAQVKQIYKTPPIKYFGGFNFSQILPDPSKPSKRSFIEDLLFNKVTLADAGFIKQYGDCLGDIAARDLICAQKFNGLTVLPPLLTDEMIAQYTSALLAGTITSGWTFGAGAALQIPFAMQMAYRFNGIGVTQNVLYENQKLIANQFNSAIGKIQDSLFSTASALGKLQDVVNHNAQALNTLVKQLSSKFGAISSVLNDILSRLDPPEAEVQIDRLITGRLQSLQTYVTQQLIRAAEIRASANLAATKMSECVLGQSKRVDFCGKGYHLMSFPQSAPHGVVFLHVTYVPAQEKNFTTAPAICHDGKSHFPREGVFVSNGTHWFVTQRNFYEPQIITTDNTFVSGNCDVVIGIVNNTVYDPLQLELDSFKEELDKYFKNHTSPDVDLGDISGINASVVNIQKEIDRLNEVAKNLNESLIDLQELGKYEQYIKWPWYIWLGFIAGLIAIVMVTIMLCCMTSCCSCLKGCCSCGSCCKFDEDDSEPVLKGVKLHYT

SEQ ID NO: 331 - protein, 1269 aa, synthetic construct
MFVFLVLLPLVSSQCVMPLFNLITTTQSYTNSFTRGVYYPDKVFRSSVLHLTQDLFLPFFSNVTWFHAISGTNGTKRFDNPVLPFNDGVYFASTEKSNIIRGWIFGTTLDSKTQSLLIVNNATNVFIKVCEFQFCNDPFLDVYHKNNKSWMESESGVYSSANNCTFEYVSQPFLMDLEGKQGNFKNLREFVFKNIDGYFKIYSKHTPIIGRDFPQGFSALEPLVDLPIGINITRFQTLLALNRSYLTPGDSSSGWTAGAADYYVGYLQPRTFLLKYNENGTITDAVDCALDPLSETKCTLKSFIVEKGIYQTSNFRVQPTESIVRFPNVTNLCPFHEVFNATRFASVYAWNRTRISNCVADYSVLYNFAPFFAFKCYGVSPTKLNDLCFTNVYADSFVIKGNEVSQIAPGQTGNIADYNYKLPDDFTGCVIAWNSNKLDSKHSGNYDYWYRSFRKSKLKPFERDISTEIYQAGNKPCKGKGPNCYFPLQSYGFRPTYGVGHQPYRVVVLSFELLHAPATVCGPKKSTNLVKNKCVNFNFNGLTGTGVLTKSNKKFLPFQQFGRDIVDITDAVRDPQTLEILDITPCSFGGVSVITPGTNTSNQVAVLYQGVNCTEVSVAIHADQLTPTWRVYSTGSNVFQTRAGCLIGAEYVNNSYECDIPIGAGICASYQTQTKSRQQAQSVASQSIIAYTMSLGAENSVAYSNNSIAIPTNFTISVTTEILPVSMTKTSVDCTMYICGDSTECSNLLLQYGSFCTQLKRALTGIAVEQDKNTQEVFAQVKQIYKTPPIKYFGGFNFSQILPDPSKPSKRSFIEDLLFNKVTLADAGFIKQYGDCLGDIAARDLICAQKFNGLTVLPPLLTDEMIAQYTSALLAGTITSGWTFGAGAALQIPFAMQMAYRFNGIGVTQNVLYENQKLIANQFNSAIGKIQDSLFSTASALGKLQDVVNHNAQALNTLVKQLSSKFGAISSVLNDILSRLDPPEAEVQIDRLITGRLQSLQTYVTQQLIRAAEIRASANLAATKMSECVLGQSKRVDFCGKGYHLMSFPQSAPHGVVFLHVTYVPAQEKNFTTAPAICHDGKAHFPREGVFVSNGTHWFVTQRNFYEPQIITTDNTFVSGNCDVVIGIVNNTVYDPLQLELDSFKDELDKYFKNHTSPDVDLGDISGINASVVNIQKEIDRLNEVAKNLNESLIDLQELGKYEQYIKWPWYIWLGFIAGLIAIVMVTIMLCCMTSCCSCLKGCCSCGSCCKFDEDDSEPVLKGVKLHYT

SEQ ID NO: 332 - protein, 1269 aa, synthetic construct
MFVFLVLLPLVSSQCVMPLFNLITTTQSYTNSFTRGVYYPDKVFRSSVLHLTQDLFLPFFSNVTWFHAISGTNGTKRFDNPVLPFNDGVYFASTEKSNIIRGWIFGTTLDSKTQSLLIVNNATNVFIKVCEFQFCNDPFLDVYHKNNKSWMESESGVYSSANNCTFEYVSQPFLMDLEGKQGNFKNLREFVFKNIDGYFKIYSKHTPIIGRDFPQGFSALEPLVDLPIGINITRFQTLLALNRSYLTPGDSSSGWTAGAADYYVGYLQPRTFLLKYNENGTITDAVDCALDPLSETKCTLKSFTVEKGIYQTSNFRVQPTESIVRFPNVTNLCPFHEVFNATRFASVYAWNRTRISNCVADYSVLYNFAPFFAFKCYGVSPTKLNDLCFTNVYADSFVIKGNEVSQIAPGQTGNIADYNYKLPDDFTGCVIAWNSNKLDSKHSGNYDYWYRSLRKSKLKPFERDISTEIYQAGNKPCKGKGPNCYFPLQSYGFRPTYGVGHQPYRVVVLSFELLHAPATVCGPKKSTNLVKNKCVNFNFNGLTGTGVLTKSNKKFLPFQQFGRDIVDTTDAVRDPQTLEILDITPCSFGGVSVITPGTNTSNQVAVLYQGVNCTEVSVAIHADQLTPTWRVYSTGSNVFQTRAGCLIGAEYVNNSYECDIPIGAGICASYQTQTKSRQQAQSVASQSIIAYTMSLGAENSVAYSNNSIAIPTNFTISVTTEILPVSMTKTSVDCTMYICGDSTECSNLLLQYGSFCTQLKRALTGIAVEQDKNTQEVFAQVKQIYKTPPIKYFGGFNFSQILPDPSKPSKRSFIEDLLFNKVTLADAGFIKQYGDCLGDIAARDLICAQKFNGLTVLPPLLTDEMIAQYTSALLAGTITSGWTFGAGAALQIPFAMQMAYRFNGIGVTQNVLYENQKLIANQFNSAIGKIQDSLFSTASALGKLQDVVNHNAQALNTLVKQLSSKFGAISSVLNDILSRLDPPEAEVQIDRLITGRLQSLQTYVTQQLIRAAEIRASANLAATKMSECVLGQSKRVDFCGKGYHLMSFPQSAPHGVVFLHVTYVPAQEKNFTTAPAICHDGKAHFPREGVFVSNGTHWFLTQRNFYEPQIITTDNTFVSGNCDVVIGIVNNTVYDPLQLELDSFKEELDKYFKNHTSPDVDLGDISGINASVVNIQKEIDRLNEVAKNLNESLIDLQELGKYEQYIKWPWYIWLGFIAGLIAIVMVTIMLCCMTSCCSCLKGCCSCGSCCKFDEDDSEPVLKGVKLHYT

SEQ ID NO: 333 - protein, 1269 aa, synthetic construct
MFVFLVLLPLVSSQCVMPLFNLITTTQSYTNSFTRGVYYPDKVFRSSVLHLTQDLFLPFFSNVTWFHAISGTNGTKRFDNPVLPFNDGVYFASTEKSNIIRGWIFGTTLDSKTQSLLIVNNATNVFIKVCEFQFCNDPFLDVYHKNNKSWMESESGVYSSANNCTFEYVSQPFLMDLEGKQGNFKNLREFVFKNIDGYFKIYSKHTPIIGRDFPQGFSALEPLVDLPIGINITRFQTLLALNRSYLTPGDSSSGWTAGAADYYVGYLQPRTFLLKYNENGTITDAVDCALDPLSETKCTLKSFTVEKGIYQTSNFRVQPTESIVRFPNVTNLCPFHEVFNATRFASVYAWNRTRISNCVADYSVLYNFAPFFAFKCYGVSPTKLNDLCFTNVYADSFVIKGNEVSQIAPGQTGNIADYNYKLPDDFTGCVIAWNSNKLDSKHSGNYDYWYRLFRKSKLKPFERDISTEIYQVGNKPCKGKGPNCYFPLQSYGFRPTYGVGHQPYRVVVLSFELLHAPATVCGPKKSTNLVKNKCVNFNFNGLTGTGVLTKSNKKFLPFQQFGRDIVDTTDAVRDPQTLEILDITPCSFGGVSVITPGTNTSNQVAVLYQGVNCTEVSVAIHADQLTPTWRVYSTGSNVFQTRAGCLIGAEYVNNSYECDIPIGAGICASYQTQTKSRQQAQSVASQSIIAYTMSLGAENSVAYSNNSIAIPTNFTISVTTEILPVSMTKTSVDCTMYICGDSTECSNLLLQYGSFCTQLKRALTGIAVEQDKNTQEVFAQVKQIYKTPPIKYFGGFNFSQILPDPSKPSKRSFIEDLLFNKVTLADAGFIKQYGDCLGDIAARDLICAQKFNGLTVLPPLLTDEMIAQYTSALLAGTITSGWTFGAGAALQIPFAMQMAYRFNGIGVTQNVLYENQKLIANQFNSAIGKIQDSLFSTASALGKLQDVVNHNAQALNTLVKQLSSKFGAISSVLNDILSRLDPPEAEVQIDRLITGRLQSLQTYVTQQLIRAAEIRASANLAATKMSECVLGQSKRVDFCGKGYHLMSFPQSAPHGVVFLHVTYVPAQEKNFTTAPAICHDGKAHFPREGVFVSNGTHWFVTQRNFYEPQIITTDNTFVSGNCDVVIGIVNNTVYDPLQLELDSFKEELDKYFKNHTSPDVDLGDISGINASVVNIQKEIDRLNEVAKNLNESLIDLQELGKYEQYIKWPWYIWLGFIAGLIAIVMVTIMLCCMTSCCSCLKGCCSCGSCCKFDEDDSEPVLKGVKLHYT

SEQ ID NO: 334 - protein, 1269 aa, synthetic construct
MFVFLVLLPLVSSQCVNLITRTQSYTNSFTRGVYYPDKVFRSSVLHSTHDLFLPFFSNVTWFHAIHVSGTNGTKRFDNPALPFNDGVYFASTEKSNIIRGWIFGTTLDSKTQSLLIVNNATNVVIKVCEFQFCNDPFLDVYQKNNKSWMESELRVYSSANNCTFEYVSQPFLMDLEGKEGNFKNLREFVFKNIDGYFKIYSKHTPINLERDLPQGFSALEPLVDLPIGINITRFQTLLALHRSYLTPVDSSSGWTAGAAAYYVGYLQPRTFLLKYNENGTITDAVDCALDPLSETKCTLKSFTVEKGIYQTSNFRVQPTESIVRFPNITNLCPFHEVFNATTFASVYAWNRKRISNCVADYSVIYNFAPFFAFKCYGVSPTKLNDLCFTNVYADSFVIRGNEVSQIAPGQTGNIADYNYKLPDDFTGCVIAWNSNKLDSKPSGNYNYRYRLLRKSKLKPFERDISTEIYQAGNKPCNGVAGPNCYSPLQSYGFRPTYGVGHQPYRVVVLSFELLHAPATVCGPKKSTNLVKNKCVNFNFNGLTGTGVLTESNKKFLPFQQFGRDIADTTDAVRDPQTLEILDITPCSFGGVSVITPGTNTSNQVAVLYQGVNCTEVPVAIHADQLTPTWRVYSTGSNVFQTRAGCLIGAEYVNNSYECDIPIGAGICASYQTQTKSHQQAQSVASQSIIAYTMSLGAENSVAYSNNSIAIPTNFTISVTTEILPVSMTKTSVDCTMYICGDSTECSNLLLQYGSFCTQLKRALTGIAVEQDKNTQEVFAQVKQIYKTPPIKYFGGFNFSQILPDPSKPSKRSFIEDLLFNKVTLADAGFIKQYGDCLGDIAARDLICAQKFNGLTVLPPLLTDEMIAQYTSALLAGTITSGWTFGAGAALQIPFAMQMAYRFNGIGVTQNVLYENQKLIANQFNSAIGKIQDSLSSTASALGKLQDVVNHNAQALNTLVKQLSSKFGAISSVLNDILSRLDPPEAEVQIDRLITGRLQSLQTYVTQQLIRAAEIRASANLAATKMSECVLGQSKRVDFCGKGYHLMSFPQSAPHGVVFLHVTYVPAQEKNFTTAPAICHDGKAHFPREGVFVSNGTHWFVTQRNFYEPQIITTDNTFVSGNCDVVIGIVNNTVYDPLQPELDSFKEELDKYFKNHTSPDVDLGDISGINASVVNIQKEIDRLNEVAKNLNESLIDLQELGKYEQYIKWPWYIWLGFIAGLIAIVMVTIMLCCMTSCCSCLKGCCSCGSCCKFDEDDSEPVLKGVKLHYT

What is claimed is:

1. An immunogenic composition comprising a first CoV S glycoprotein having an amino acid sequence with at least 80%, at least 85%, at least 90%, at least 91%, at least 92%, at least 93%, at least 94%, at least 95%, at least 96%, at least 97%, at least 98%, at least 99%, or 100% identity to any of SEQ ID NOS: 329.

2. The immunogenic composition of claim 1, comprising from 0.1 μg to 25 μg, 0.1 μg to 10 μg, 0.001 μg to 10 μg, 0.001 μg to 25 μg, or from 0.1 μg to 5 μg of the first CoV S glycoprotoein.

3. The immunogenic composition of claim 1, comprising a nanoparticle comprising the first CoV S glycoprotein and a non-ionic detergent core.

4. The immunogenic composition of claim 3, wherein the non-ionic detergent is selected from the group consisting of polysorbate-20 (PS20), polysorbate-40 (PS40), polysorbate-60 (PS60), polysorbate-65 (PS65), and polysorbate-80 (PS80).

5. The immunogenic composition of claim 1, further comprising an adjuvant and a pharmaceutically acceptable carrier.

6. The immunogenic composition of claim 5, wherein the adjuvant is a saponin adjuvant.

7. The immunogenic composition of claim 6, wherein the saponin adjuvant comprises at least two iscom particles, wherein:
the first iscom particle comprises fraction A of Quillaja Saponaria Molina and not fraction C of Quillaja Saponaria Molina; and
the second iscom particle comprises fraction C of Quillaja Saponaria Molina and not fraction A of Quillaja Saponaria Molina.

8. The immunogenic composition of claim 5, comprising from about 25 μg to about 100 μg of adjuvant.

9. The immunogenic composition of claim 1, wherein the immunogenic composition is contained in a syringe.

10. A method of stimulating an immune response against SARS-COV-2 or a heterogeneous SARS-COV-2 strain thereof in a human comprising administering the immunogenic composition of claim 1 to the human.

11. A method of boosting an immune response against SARS-COV-2 or a heterogeneous SARS-COV-2 strain thereof in a human comprising administering:
a first immunogenic composition comprising (a) one or more first SARS-COV-2 S glycoproteins having at least 80%, at least 81%, at least 82%, at least 83%, at least 84%, at least 85%, at least 86%, at least 87%, at least 88%, at least 89%, at least 90%, at least 91%, at least 92%, at least 93%, at least 94%, at least 95%, at least 96%, at least 97%, at least 98%, at least 99%, or 100% identity to SEQ ID NO: 329, and (b) a pharmaceutically acceptable buffer;
wherein the immunogenic composition is administered after administration of another immunogenic composition intended to produce an immunogenic response against SARS-CoV-2 or a heterogeneous SARS-COV-2 strain thereof in the human.

12. The method of claim 11, comprising administering a first dose of the first immunogenic composition at least 21 days after administration of the other immunogenic composition.

13. The method of claim 12, comprising administering the first immunogenic composition from about 1 month to about 18 months, from about 6 months to about 18 months, from about 9 months to about 18 months, from about 12 months to about 15 months, or from about 12 months to about 18 months after administration of the other immunogenic composition.

14. The method of claim 11, wherein the other immunogenic composition comprises an mRNA vaccine or a protein subunit vaccine.

15. The method of claim 14, wherein the protein subunit vaccine of the other immunogenic composition comprises at least one or more second SARS-COV-2 S glycoproteins having at least 80%, at least 81%, at least 82%, at least 83%, at least 84%, at least 85%, at least 86%, at least 87%, at least 88%, at least 89%, at least 90%, at least 91%, at least 92%, at least 93%, at least 94%, at least 95%, at least 96%, at least 97%, at least 98%, at least 99%, or 100% identity to any of SEQ ID NOS: 87, 260, 222, 227, 274, and 284, and 329.

16. The immunogenic composition of claim 1, wherein the first CoV S glycoprotein comprises one or more modifications compared to SEQ ID NO: 329 at amino acid 59,346,456, 475, 572, and 1087, wherein the one or more modifications are numbered according to SEQ ID NO: 1.

17. The immunogenic composition of claim 16, wherein:
(i) amino acid at 59 is phenylalanine or serine;
(ii) amino acid at 346 is arginine or threonine;
(iii) amino acid at 456 is phenylalanine or leucine;
(iv) amino acid at 475 is alanine or valine:
(v) amino acid at 572 is threonine or isoleucine; and
(vi) amino acid at 1087 is alanine or serine.

18. A method of inducing an immune response against SARS-COV-2 or a heterogeneous SARS-COV-2 strain thereof in a human comprising administering:
a first immunogenic composition comprising (a) one or more first SARS-COV-2 S glycoproteins having at least 80%, at least 81%, at least 82%, at least 83%, at least 84%, at least 85%, at least 86%, at least 87%, at least 88%, at least 89%, at least 90%, at least 91%, at least 92%, at least 93%, at least 94%, at least 95%, at least 96%, at least 97%, at least 98%, at least 99%, or 100% identity to SEQ ID NO: 329, and (b) a pharmaceutically acceptable buffer.

19. A method as recited in claim 18, further comprising administering a second immunogenic composition, comprising (a) one or more second SARS-COV-2 S glycoproteins having at least 80%, at least 81%, at least 82%, at least 83%, at least 84%, at least 85%, at least 86%, at least 87%, at least 88%, at least 89%, at least 90%, at least 91%, at least 92%, at least 93%, at least 94%, at least 95%, at least 96%, at least 97%, at least 98%, at least 99%, or 100% identity to any of SEQ ID NOS: 87, 260, 222, 227, 274, and 284, and 329.

20. An immunogenic composition comprising:
(i) one or more non-naturally occurring SARS-COV-2 S glycoproteins having at least 80%, at least 81%, at least 82%, at least 83%, at least 84%, at least 85%, at least 86%, at least 87%, at least 88%, at least 89%, at least 90%, at least 91%, at least 92%, at least 93%, at least 94%, at least 95%, at least 96%, at least 97%, at least 98%, at least 99%, or 100% identity to any one of SEQ ID NOS: 87, 260, 222, 227, 274, and 284; and
(ii) a pharmaceutically acceptable buffer.
